(19) United States
(12) Patent Application Publication
(10) Pub. No.: US 2021/0236619 A1
(43) Pub. Date: Aug. 5, 2021

(54) STEM CELLS COMPRISING SYNTHETIC CHIMERIC VACCINIA VIRUS AND METHODS OF USING THEM

(71) Applicant: TONIX PHARMA HOLDINGS LIMITED, HAMILTON (BM)

(72) Inventor: Seth Lederman, South Dartmouth, MA (US)

(21) Appl. No.: 17/049,741

(22) PCT Filed: May 2, 2019
(86) PCT No.: PCT/US2019/030488

§ 371 Date: Oct. 22, 2020

Related U.S. Application Data
(60) Provisional application No. 62/666,013, filed on May 2, 2018.

(51) Int. Cl. A61K 39/12; C12N 7/00; A61P 35/00; A61K 35/28

(52) U.S. Cl. CPC A61K 39/12; C12N 7/00; A61K 2039/5252; A61K 35/28; A61P 35/00

(57) ABSTRACT

The invention relates in various aspects to stem cells comprising a synthetic chimeric poxvirus (scPV), which can be used for the treatment of cancer or other infectious diseases. It also relates to methods for delivering the scPV comprising infecting the stem cells with the scPV and administering the infected stem cells to a subject.

### BACKGROUND OF THE DISCLOSURE

[0001] A Sequence Listing associated with this application is being submitted electronically via EFS-Web in text format and is hereby incorporated by reference in its entirety into the specification. The name of the text file containing the Sequence Listing is 104545-0032-WO1-SequenceListing.txt. The text file, created on May 2, 2019, is 882,663 bytes in size.

[0002] Poxviruses (members of the Poxviridae family) are double-stranded DNA viruses that can infect both humans and animals. Poxviruses are divided into two subfamilies based on host range. The Chordopoxviridae subfamily, which infects vertebrate hosts, consists of eight genera, of which four genera (Orthopoxvirus, Parapoxvirus, Molluscipoxvirus, and Yatapoxvirus) are known to infect humans. Smallpox is caused by infection with variola virus (VARV), a member of the genus Orthopoxvirus (OPV). The OPV genus comprises a number of genetically related and morphologically identical viruses, including camelpox virus (CMLV), cowpox virus (CPXV), ectromelia virus (ECTV, “mousepox agent”), horsepox virus (HPXV), monkeypox virus (MPXV), rabbitpox virus (RPXV), raccoonpox virus, skunkpox virus, Taterapox virus, Uasin Gishu disease virus, vaccinia virus (VACV), variola virus (VARV) and volepox virus (VPV). Other than VARV, at least three other OPVs, including VACV, MPXV and CPXV, are known to infect humans.

[0003] In the ongoing search for therapeutics that are capable of eliminating or reducing tumor cells, oncolytic viruses have shown great potential in preclinical studies. These viruses are typically genetically engineered or have a natural tropism for tumor cells, so as to only replicate in and kill neoplastic cells. Among therapeutic viruses, oncolytic Vaccinia virus is one of the most promising candidates for cancer therapy. As an example, JX-594 is a Vaccinia virus with TK gene deletion and GM-CSF (a cytokine able to stimulate the immune system to kill tumor cells) gene insertion and is currently undergoing phase III trials (Park S H et al. Phase 1b trial of biweekly intravenous Pexa-Vec (JX-594), an oncolytic and immunotherapeutic vaccinia virus in colorectal cancer. Mol Ther (2015); 23(9):1532-40).

[0004] To improve delivery of viral therapeutics and circumvent antiviral immunity, a number of studies have explored the possibility of using infected cells as delivery vehicles for oncolytic viruses (Garcia-Castro, J., et al., Treatment of metastatic neuroblastoma with systemic oncolytic virotherapy delivered by autologous mesenchymal stem cells: an exploratory study. Cancer Gene Ther, 2010. 17(7): 476-83; Coukos, G., et al., Use of carrier cells to deliver a replication-selective herpes simplex virus-1 mutant for the intraperitoneal therapy of epithelial ovarian cancer. Clin Cancer Res, 1999. 5(6): 1523-37; Komarova, S., et al., Mesenchymal progenitor cells as cellular vehicles for delivery of oncolytic adenoviruses. Mol Cancer Ther, 2006. 5(3): 755-66). Mesenchymal stem cells have shown great promise in this respect.

[0005] Although promising, these studies have been limited by their inability to explore the therapeutic efficacy of mesenchymal stem cells loaded with oncolytic viruses. Additionally, cell therapies, such as administration of stem cells, have been associated with formation of malignant cancers in subjects receiving stem cell therapies. While the potential of cellular therapy in the treatment of diseases, disorders and injury is significant, the formation of tumors, such as teratomas, as a result of such treatment is an unacceptable outcome.

[0006] Accordingly, there exists a need for methods of delivering oncolytic viruses and safely administering cellular compositions that reduce the risk of tumor formation in subjects receiving cellular therapy.

### SUMMARY OF THE DISCLOSURE

[0007] The present invention, in one aspect, provides stem cells comprising a synthetic chimeric poxvirus (scPV), which can be used for the treatment of cancer or other infectious diseases. Because chemical genome synthesis is not dependent on a natural template, a plethora of structural and functional modifications of the viral genome are possible. Chemical genome synthesis is particularly useful when a natural template is not available for genetic replication or modification by conventional molecular biology methods.

[0008] Therefore, in one aspect, the invention relates to an isolated stem cell or population thereof comprising a synthetic chimeric poxvirus (scPV), wherein the virus is replicated and reactivated from DNA derived from synthetic DNA, the viral genome of said virus differing from a wild type genome of said virus in that it is characterized by one or more modifications.

[0009] In another aspect, the invention relates to a pharmaceutical composition comprising the isolated stem cells of the invention, and a pharmaceutically acceptable carrier.

[0010] In another aspect, the invention relates to a method for delivering the scPV of the invention to a subject, comprising infecting the stem cells of the invention and administering the scPV-infected stem cells into the subject.

[0011] In another aspect, the invention relates to a method of treating or preventing cancer in a subject, comprising administering the stem cells of the invention or the pharmaceutical composition of the invention to the subject, to thereby contact the cancer cells of the subject with the scPV.

[0012] In another aspect, the invention relates to a method of treating a variola virus infection, comprising administering to a subject in need thereof the stem cells of the invention or the pharmaceutical composition of the invention.

### BRIEF DESCRIPTION OF THE DRAWINGS

[0013] This patent application contains at least one drawing executed in color. Copies of this patent application with color drawings will be provided by the Office upon request and payment of the necessary fee.

[0014] The foregoing summary, as well as the following detailed description of the disclosure, will be better understood when read in conjunction with the appended drawings. For the purpose of illustrating various aspects of the invention there are shown in the drawings embodiment(s) which are presently preferred. It should be understood, however, that the invention is not limited to the precise arrangements and instrumentalities shown.

[0015] FIGS. 1A and 1B. Schematic representation of the linear dsDNA HPXV genome (strain MNR; Genbank Accession DQ792504). A. FIG. 1A illustrates the unmodified genome sequence of HPXV genome with individual HPXV genes (purple) and the naturally occurring AarI and BsaI sites indicated. B. FIG. 1B depicts the modified synthetic chimeric HPXV (scHPXV) genome that was chemically synthesized using the overlapping genomic DNA fragments (shown in red). The engineered SapI restriction sites that were used to ligate the VACV terminal hairpin loops onto the ITRs, along with the unmodified BsaI sites in the left and right ITR fragments, are also shown. The SapI sites were located in plasmid vector sites immediately to the left and right ends of the Left Inverted Terminal Repeat (LITR) and Right Inverted Terminal Repeat (RITR), respectively.

[0016] FIG. 2A-2C. Detailed schematic representation of the modified scHPXV YFP-gpt::095 genome and VACV (WR strain) terminal hairpin loops. A. FIG. 2A depicts the modified scHPXV YFP-gpt::095 genome. The unmodified BsaI sites are shown as blue lines on the genome. The novel AvaI and StuI restriction sites that were created in HPXV044 (the VACV F4L homolog) are also marked (green lines). The location of the selectable marker yellow fluorescent protein/guanosine phosphoribosyl transferase (yfp/gpt) in the HPXV095 locus (the VACV J2R homolog) of Frag_3 is also shown (yellow). B. FIG. 2B depicts the nucleotide sequence of the S (SEQ ID NO: 11) and F (SEQ ID NO: 12) forms of the terminal hairpin loop, and the color coding is explained in (C). C. FIG. 2C depicts the secondary structure predictions of the F and S forms of terminal hairpin loops (SEQ ID NOS 12 and 11, respectively) that are covalently attached to the terminal ends of the linear dsDNA genomes of VACV. The terminal loop sequence is highlighted in green. The concatamer resolution sequence is boxed in red.

[0017] FIG. 3. The ˜70 bp VACV terminal hairpin was ligated to the left and right HPXV ITR fragments. FIG. 3 depicts agarose gel electrophoresis of the left and right ITR fragments following ligation of the ˜70 bp terminal hairpin to the 1472 bp ITR fragment cut with SapI. The ligated DNAs were subsequently cut with PvuII to facilitate detection of the small change in size caused by the addition of the hairpins.

[0018] FIG. 4A-4B. PCR analysis and restriction digestion of scHPXV YFP-gpt::095 genomes confirm successful reactivation of scHPXV YFP-gpt::095. A. FIG. 4A depicts pulse field gel electrophoresis (PFGE) of VACV-WR and scHPXV YFP-gpt::095 genomic DNAs. Virus DNAs was digested with BsaI, HindIII, or left untreated, and were then separated on a 1% Seakem gold agarose gel for 14 h at 14° C. at 5.7V/cm with a switch time of 1 to 10 seconds. A slight difference in size between the intact VACV and scHPXV YFP-gpt::095 genomes was observed. The faint bands marked with an asterisk (*) are either incomplete DNA digestion products or could be cut mitochondrial DNA fragments that often contaminate VACV virion preparations. B. FIG. 4B depicts conventional agarose gel electrophoresis of VACV-WR and scHPXV YFP-gpt::095 genomic DNA digested with BsaI or HindIII. DNA fragments were visualized by staining gels with SybrGold DNA stain.

[0019] FIG. 5A-5C. The BsaI sites in scHPXV YFP-gpt::095 region 96,050 to 96,500 were correctly mutated. FIG. 5A depicts Illumina sequence reads that mapped to one region of the HPXV (DQ792504) genome. Only a small fraction of the reads is shown. The conflicts in the sequencing reads at pos. 96,239 and pos. 96437 are highlighted in blue and yellow, respectively. FIG. 5B depicts the magnification of the Illumina sequencing reads from scHPXV YFP-gpt::095 that mapped to HPXV (DQ792504) near pos. 96239. A nucleotide substitution (T96239C) was detected (refer to Table 2). Figure discloses SEQ ID NOS 68-70, 69, 71, 72, 69, 73-76, 69, 77-79, 69, 69, 80, 81, 69, 82, 69, 83, 69, 84, 69, 84, 85, 69, 69, 86, 69, 69, 87, 69, 69, 69, 69, 88, 69, 69, 69, 89, and 90, respectively, in order of appearance. FIG. 5C depicts the magnification of the Illumina sequencing reads from scHPXV YFP-gpt::095 that mapped to HPXV (DQ792504) at pos. 96437. A nucleotide substitution (A96437C) was detected (refer to Table 2). These mutations were introduced into the clones used to assemble scHPXV YFP-gpt::095 so as to delete undesirable BsaI recognition sites (GGTCTC). Figure discloses SEQ ID NOS 91-94, 92, 95, 92, 92, 92, 96, 92, 97, 98, 92, 92, 92, 92, 92, 99-101, 92, 102, 103, 92, 104-109, 92, 110, 92, 92, 111, 103, 112, 92, 113, 114, 92, 92, 115, and 116, respectively, in order of appearance.

[0020] FIG. 6A-6C. ScHPXV YFP-gpt::095 grows like other Orthopoxviruses but exhibits a small plaque phenotype in BSC-40 cells. A. FIG. 6A illustrates the multi-step growth of VACV-WR, DPP15, CPXV, and scHPXV YFP-gpt::095 in BSC-40 (top left panel), HeLa (top middle panel), primary HEL (top right panel), and Vero (bottom left panel) cell lines. B. FIG. 6B illustrates plaque size comparisons between VACV-WR, DPP15, CPXV, and scHPXV YFP-gpt::095. BSC-40 cells were infected with the indicated viruses and at 48 h post infection the cells were fixed and stained. The areas (in arbitrary units [A.U.]) of 24 plaques over three independent experiments were measured for each virus. Data are expressed as the mean plaque diameter. **, P<0.01; ****, P<0.0001. C. FIG. 6C depicts plaque morphology of BSC-40 cells infected with the indicated viruses for 72 h. Cells were fixed, stained, and scanned for visualization.

[0021] FIG. 7. A graphical representation of the % weight loss overtime after administration of various compositions and doses to mice. The depicted data are generated from groups of 5 female BALB/c mice that are inoculated with the indicated dose of scHPXV YFP-gpt::095 (also designated as scHPXV(ΔHPXV_095/J2R) or scHPXV (yfp/gpt)), scHPXV (wt), Dryvax DPP15, or VACV WR in 10 μl of PBS. Mice are weighed daily for 28 days and any that lost >25% of their initial weight are euthanized. Data points represent mean scores, and error bars represent standard deviation.

[0022] FIGS. 8A and 8B. Graphical representations of the % weight loss over time after administration of various compositions and doses to mice. The depicted data are generated from mice that are previously vaccinated (FIG. 10) and who are then challenged with a lethal dose of VACV WR (10⁶ PFU) intranasally. FIG. 8A shows the weight changes and FIG. 8B shows the clinical scores in mice recorded daily for 13 days. Any mice that lost >25% of their initial weight are euthanized. Mice are assigned a clinical score based upon the appearance of ruffled fur, hunched posture, difficulty breathing, and decreased mobility. Data points represent mean differences in weights or scores, and error bars represent standard deviation. † indicate the number of mice that succumb to the VACV infection on a given day.

[0023] FIG. 9. Graphical representation of the % survival over time after administration of various compositions and doses to mice. The depicted data are generated from mice that are previously vaccinated (FIG. 7) and who are then challenged with a lethal dose of VACV WR (10⁶ PFU) intranasally. FIG. 9 shows survival curves of mice who are challenged intranasally with a lethal dose of VACV WR (10⁶ PFU). † indicate the number of mice that succumb to the VACV infection on the indicated day.

[0024] FIGS. 10A and 10B. Characterization of VACV-HPXV hybrid viruses. FIG. 10A. HPXV inserts in VACV strain WR. Virus genomes were sequenced using an Illumina platform, assembled, and LAGAN and “Base-by-Base” software were used to align and generate the maps shown. Places where VACV sequences (white) have been replaced by HPXV sequences are color coded according to the difference. FIG. 10B. A PCR-based screening approach for identifying hybrid and reactivated viruses. Following PCR amplification, the products were digested with BsaI to differentiate VACV sequences (which cut) from HPXV (which do not cut). The VACV/HPXV hybrids exhibit a mix of BsaI sensitive and resistant sites whereas the reactivated scHPXV YFP-gpt::095 clone is fully BsaI resistant.

[0025] FIG. 11A-11C. Growth properties of scHPXV versus scHPXV YFP-gpt::095. FIG. 11A. Plaque size measurements. Homologous recombination was used to replace the YFP-gpt locus in scHPXV YFP-gpt::095 with thymidine kinase gene sequences. This produced a virus with a fully wild-type complement of HPXV genes (scHPXV). BSC-40 cells were infected with the indicated viruses and cultured for three days. The dishes were stained and the plaque areas measured using a scanned digital image. Statistically significant differences are noted ****P<0.0001). FIG. 11B. Plaque images. FIG. 11C. Multi-step virus growth in culture. The indicated cell lines were infected with scHPXV or scHPXV YFP-gpt::095 at a multiplicity of infection of 0.01, the virus harvested at the indicated times, and titrated on BSC-40 cells in triplicate. No significant differences in the growth of these viruses were detected in these in vitro assays.

[0026] FIG. 12. Schematic representation of the linear dsDNA VACV genome strain ACAM2000; Genbank Accession AY313847. FIG. 12 depicts the modified VACV ACAM2000 genome that was used to chemically synthesize large ds DNA fragments. The overlapping scVACV ACAM2000 genomic fragments are depicted in blue. The engineered BsaI restriction sites that were not silently mutated in the Left Inverted Terminal Repeat (LITR) and the Right Inverted Terminal Repeat (RITR), are also shown.

[0027] FIG. 13A-13C. Detailed schematic representation of the first ˜1500-3000 bp of the published genomes of (A) VACV WR strain and (B) VACV ACAM2000. The tandem repeat regions are clearly indicated in red (70 bp repeat), blue (125 bp repeat) and green (54 bp repeat) boxes. The ORF corresponding to gene C23L is also indicated in each of the genomes. (C) Schematic representation of the direct repeat region containing 70 bp repeat sequences in VACV WR. This sequence was synthesized to contain a SapI restriction site at the 5′ terminus and an NheI restriction site at the 3′ terminus to ligate the hairpin/duplex piece and the VACV ACAM2000 ITR fragments, respectively.

[0028] FIG. 14. Assembly of vaccinia virus terminal hairpin loop with duplex DNA to the first 70 bp repeat sequence. Gel electrophoresis of duplex DNA (lane 2) and hairpin DNA alone (lane 3) and following ligation (lane 4) are depicted. The ligated product (arrow) was subsequently excised from the gel and purified, so that it could be ligated to a 70 bp repeat sequence to mimic the sequence of the wtVACV ACAM2000 sequence.

[0029] FIG. 15. Growth properties of scVACV ACAM2000-WR DUP/HP in vitro. Multi-step growth kinetics measured in monkey kidney epithelial cells (BSC-40). The cells were infected at a multiplicity of infection 0.03, the virus was harvested at the indicated times, and the virus was titrated on BSC-40 cells. The data represent three independent experiments. The error bars indicate standard error of the mean (SEM).

[0030] FIG. 16. Growth properties of scVACV ACAM2000-WR DUP/HP and scVACV ACAM2000-ACAM2000 DUP/HP in vitro, compared to scVACV ACAM2000-WR DUP/HP and scVACV ACAM2000-ACAM2000 DUP/HP where the YFP-gpt marker has been replaced with the J2R gene sequence (VAC_WRAJ2R) and wtVACV ACAM2000. Multi-step growth kinetics measured in monkey kidney epithelial cells (BSC-40). The cells were infected at a multiplicity of infection 0.03, the virus was harvested at the indicated times, and the virus was titrated on BSC-40 cells. The error bars indicate standard error of the mean (SEM).

[0031] FIG. 17. Restriction endonuclease mapping of reactivated scVACV ACAM2000-WR DUP/HP clones. Pulsed field gel electrophoretic analysis. Two independent scVACV ACAM2000-WR DUP/HP clones plus a VACV WR control, where the YFP-gpt marker has been replaced with the J2R gene sequence (VAC_WRAJ2R) and a wtVACV ACAM2000 control (VAC_ACAM2000) were purified and then left either undigested, digested with BsaI, HindIII, or Not and PvuI. The expected absence of nearly all of the BsaI sites in the scVACV ACAM2000 clones was apparent. Minor differences in the HindIII digested scVACV ACAM2000 genomic DNA compared to VACV_WRAJ2R and VACV_ACAM2000 were observed. Genomic DNA digested with Not and PvuI excises the 70 bp tandem repeat fragments found at the left and right ITR sequences. In VACV_WRAJ2R the ˜size of the 70 bp repeats is close to 3.6 kbp. Interestingly, in the two independent scVACV ACAM2000 clones two different sized bands corresponding to the 70 bp tandem repeat were observed (marked with an *), even though a full-length 70 bp tandem repeat element was ligated to the ITR fragments. When ACAM2000 genomic DNA was digested with Nod and PvuI, a band at ˜4.7 kbp was observed, which may indicate the size of the 70 bp repeats in ACAM2000.

### DETAILED DESCRIPTION OF THE DISCLOSURE

### General Techniques

[0032] Unless otherwise defined herein, scientific and technical terms used in this application shall have the meanings that are commonly understood by those of ordinary skill in the art. Generally, nomenclature used in connection with, and techniques of, pharmacology, cell and tissue culture, molecular biology, cell and cancer biology, neurobiology, neurochemistry, virology, immunology, microbiology, genetics and protein and nucleic acid chemistry, described herein, are those well-known and commonly used in the art. In case of conflict, the present specification, including definitions, will control.

[0033] The practice of various aspects of the present invention will employ, unless otherwise indicated, conventional techniques of molecular biology (including recombinant techniques), microbiology, cell biology, biochemistry and immunology, which are within the skill of the art. Such techniques are explained fully in the literature, such as Molecular Cloning: A Laboratory Manual, second edition (Sambrook et al., 1989) Cold Spring Harbor Press; Oligonucleotide Synthesis (M. J. Gait, ed., 1984); Methods in Molecular Biology, Humana Press; Cell Biology: A Laboratory Notebook (J. E. Cellis, ed., 1998) Academic Press; Animal Cell Culture (R. I. Freshney, ed., 1987); Introduction to Cell and Tissue Culture (J. P. Mather and P. E. Roberts, 1998) Plenum Press; Cell and Tissue Culture: Laboratory Procedures (A. Doyle, J. B. Griffiths, and D. G. Newell, eds., 1993-1998) J. Wiley and Sons; Methods in Enzymology (Academic Press, Inc.); Gene Transfer Vectors for Mammalian Cells (J. M. Miller and M. P. Calos, eds., 1987); Current Protocols in Molecular Biology (F. M. Ausubel et al., eds., 1987); PCR: The Polymerase Chain Reaction, (Mullis et al., eds., 1994); Sambrook and Russell, Molecular Cloning: A Laboratory Manual, 3rd. ed., Cold Spring Harbor Laboratory Press, Cold Spring Harbor, N.Y. (2001); Ausubel et al., Current Protocols in Molecular Biology, John Wiley & Sons, N Y (2002); Harlow and Lane Using Antibodies: A Laboratory Manual, Cold Spring Harbor Laboratory Press, Cold Spring Harbor, N.Y. (1998); Coligan et al., Short Protocols in Protein Science, John Wiley & Sons, N Y (2003); Short Protocols in Molecular Biology (Wiley and Sons, 1999).

[0034] Enzymatic reactions and purification techniques are performed according to manufacturer's specifications, as commonly accomplished in the art or as described herein. The nomenclatures used in connection with, and the laboratory procedures and techniques of, analytical chemistry, biochemistry, immunology, molecular biology, synthetic organic chemistry, and medicinal and pharmaceutical chemistry described herein are those well-known and commonly used in the art. Standard techniques are used for chemical syntheses, and chemical analyses.

[0035] Throughout this specification and embodiments, the word “comprise,” or variations such as “comprises” or “comprising,” will be understood to imply the inclusion of a stated integer or group of integers but not the exclusion of any other integer or group of integers.

[0036] It is understood that wherever embodiments are described herein with the language “comprising,” otherwise analogous embodiments described in terms of “consisting of” and/or “consisting essentially of” are also provided.

[0037] The term “including” is used to mean “including but not limited to.” “Including” and “including but not limited to” are used interchangeably.

[0038] Any example(s) following the term “e.g.” or “for example” is not meant to be exhaustive or limiting.

[0039] Unless otherwise required by context, singular terms shall include pluralities and plural terms shall include the singular.

[0040] The articles “a”, “an” and “the” are used herein to refer to one or to more than one (i.e., to at least one) of the grammatical object of the article. By way of example, “an element” means one element or more than one element. Reference to “about” a value or parameter herein includes (and describes) embodiments that are directed to that value or parameter per se. For example, description referring to “about X” includes description of “X.” Numeric ranges are inclusive of the numbers defining the range.

[0041] Notwithstanding that the numerical ranges and parameters setting forth the broad scope of the application are approximations, the numerical values set forth in the specific examples are reported as precisely as possible. Any numerical value, however, inherently contains certain errors necessarily resulting from the standard deviation found in their respective testing measurements. Moreover, all ranges disclosed herein are to be understood to encompass any and all subranges subsumed therein. For example, a stated range of “1 to 10” should be considered to include any and all subranges between (and inclusive of) the minimum value of 1 and the maximum value of 10; that is, all subranges beginning with a minimum value of 1 or more, e.g., 1 to 6.1, and ending with a maximum value of 10 or less, e.g., 5.5 to 10.

[0042] Exemplary methods and materials are described herein, although methods and materials similar or equivalent to those described herein can also be used in the practice or testing of the present invention. The materials, methods, and examples are illustrative only and not intended to be limiting.

### Definitions

[0043] The following terms, unless otherwise indicated, shall be understood to have the following meanings:

[0044] As used herein, the terms “wild type virus”, “wild type genome”, “wild type protein,” or “wild type nucleic acid” refer to a sequence of amino or nucleic acids that occurs naturally within a certain population (e.g., a particular viral species, etc.).

[0045] The terms “chimeric” or “engineered” or “modified” (e.g., chimeric poxvirus, engineered polypeptide, modified polypeptide, engineered nucleic acid, modified nucleic acid) or grammatical variations thereof are used interchangeably herein to refer to a non-native sequence that has been manipulated to have one or more changes relative a native sequence.

[0046] As used herein, “synthetic virus” refers to a virus initially derived from synthetic DNA (e.g., chemically synthesized DNA, PCR amplified DNA, engineered DNA, polynucleotides comprising nucleoside analogs, etc., or combinations thereof) and includes its progeny, and the progeny may not necessarily be completely identical (in morphology or in genomic DNA complement) to the original parent synthetic virus due to natural, accidental, or deliberate mutation. In some embodiments, the synthetic virus refers to a virus where substantially all of the viral genome is initially derived from synthetic DNA (e.g., chemically synthesized DNA, PCR amplified DNA, engineered DNA, polynucleotides comprising nucleoside analogs, etc., or combinations thereof). In a preferred embodiment, the synthetic virus is derived from chemically synthesized DNA.

[0047] As outlined elsewhere herein, certain positions of the viral genome can be altered. By “position” as used herein is meant a location in the genome sequence. Corresponding positions are generally determined through alignment with other parent sequences.

[0048] As used herein, the term “residue” in the context of a polypeptide refers to an amino-acid unit in the linear polypeptide chain. It is what remains of each amino acid, i.e —NH—CHR—C—, after water is removed in the formation of the polypeptide from α-amino-acids, i.e. NH2-CHR—COOH.

[0049] As known in the art, “polynucleotide,” or “nucleic acid,” as used interchangeably herein, refer to chains of nucleotides of any length, and include DNA and RNA. The nucleotides can be deoxyribonucleotides, ribonucleotides, modified nucleotides or bases, and/or their analogs, or any substrate that can be incorporated into a chain by DNA or RNA polymerase. A polynucleotide may comprise modified nucleotides, such as methylated nucleotides and their analogs. If present, modification to the nucleotide structure may be imparted before or after assembly of the chain. The sequence of nucleotides may be interrupted by non-nucleotide components. A polynucleotide may be further modified after polymerization, such as by conjugation with a labeling component. Other types of modifications include, for example, “caps”, substitution of one or more of the naturally occurring nucleotides with an analog; internucleotide modifications such as, for example, those with uncharged linkages (e.g., methyl phosphonates, phosphotriesters, phosphoamidates, carbamates, etc.) and with charged linkages (e.g., phosphorothioates, phosphorodithioates, etc.); those containing pendant moieties, such as, for example, proteins (e.g., nucleases, toxins, antibodies, signal peptides, poly-L-lysine, etc.); those with intercalators (e.g., acridine, psoralen, etc.); those containing chelators (e.g., metals, radioactive metals, boron, oxidative metals, etc.); those containing alkylators; those with modified linkages (e.g., alpha anomeric nucleic acids, etc.); as well as unmodified forms of the polynucleotide(s). Further, any of the hydroxyl groups ordinarily present in the sugars may be replaced, for example, by phosphonate groups, phosphate groups, protected by standard protecting groups, or activated to prepare additional linkages to additional nucleotides, or may be conjugated to solid supports. The 5′ and 3′ terminal OH can be phosphorylated or substituted with amines or organic capping group moieties of from 1 to 20 carbon atoms. Other hydroxyls may also be derivatized to standard protecting groups. Polynucleotides can also contain analogous forms of ribose or deoxyribose sugars that are generally known in the art, including, for example, 2′-O-methyl-, 2′-O-allyl, 2′-fluoro- or 2′-azido-ribose, carbocyclic sugar analogs, alpha- or beta-anomeric sugars, epimeric sugars such as arabinose, xyloses or lyxoses, pyranose sugars, furanose sugars, sedoheptuloses, acyclic analogs and abasic nucleoside analogs such as methyl riboside. One or more phosphodiester linkages may be replaced by alternative linking groups. These alternative linking groups include, but are not limited to, embodiments wherein phosphate is replaced by P(O)S (“thioate”), P(S)S (“dithioate”), (O)NR₂ (“amidate”), P(O)R, P(O)OR′, CO or CH₂ (“formacetal”), in which each R or R′ is independently H or substituted or unsubstituted alkyl (1-20 C) optionally containing an ether (—O—) linkage, aryl, alkenyl, cycloalkyl, cycloalkenyl or araldyl. Not all linkages in a polynucleotide need be identical. The preceding description applies to all polynucleotides referred to herein, including RNA and DNA.

[0050] The terms “polypeptide”, “oligopeptide”, “peptide” and “protein” are used interchangeably herein to refer to chains of amino acids of any length. The chain may be linear or branched, it may comprise modified amino acids, and/or may be interrupted by non-amino acids. The terms also encompass an amino acid chain that has been modified naturally or by intervention; for example, disulfide bond formation, glycosylation, lipidation, acetylation, phosphorylation, or any other manipulation or modification, such as conjugation with a labeling component. Also included within the definition are, for example, polypeptides containing one or more analogs of an amino acid (including, for example, unnatural amino acids, etc.), as well as other modifications known in the art. It is understood that the polypeptides can occur as single chains or associated chains.

[0051] “Homologous,” in all its grammatical forms and spelling variations, refers to the relationship between two proteins that possess a “common evolutionary origin,” including proteins from superfamilies in the same species of organism, as well as homologous proteins from different species of organism. Such proteins (and their encoding nucleic acids) have sequence homology, as reflected by their sequence similarity, whether in terms of percent identity or by the presence of specific residues or motifs and conserved positions. “Homologous” may also refer to a nucleic acid which is native to the virus.

[0052] However, in common usage and in the instant application, the term “homologous,” when modified with an adverb such as “highly,” may refer to sequence similarity and may or may not relate to a common evolutionary origin.

[0053] “Heterologous,” in all its grammatical forms and spelling variations, may refer to a DNA which is non-native to the virus. It means derived from a different species or a different strain than the DNA of the organism to which the DNA is described as heterologous relative to. In a non-limiting example, the viral genome of the scPV comprises heterologous terminal hairpin loops. Said heterologous terminal hairpin loops can be derived from a different virus species or from a different virus strain.

[0054] The term “sequence similarity,” in all its grammatical forms, refers to the degree of identity or correspondence between nucleic acid or amino acid sequences that may or may not share a common evolutionary origin.

[0055] “Percent (%) sequence identity” or “sequence % identical to” with respect to a reference polypeptide (or nucleotide) sequence is defined as the percentage of amino acid residues (or nucleic acids) in a candidate sequence that are identical with the amino acid residues (or nucleic acids) in the reference polypeptide (nucleotide) sequence, after aligning the sequences and introducing gaps, if necessary, to achieve the maximum percent sequence identity, and not considering any conservative substitutions as part of the sequence identity. Alignment for purposes of determining percent amino acid sequence identity can be achieved in various ways that are within the skill in the art, for instance, using publicly available computer software such as BLAST, BLAST-2, ALIGN or Megalign (DNASTAR) software. Those skilled in the art can determine appropriate parameters for aligning sequences, including any algorithms needed to achieve maximal alignment over the full length of the sequences being compared.

[0056] As used herein, a “host cell” includes an individual cell or cell culture that can be or has been a recipient for vector(s) for incorporation of polynucleotide inserts. Host cells include progeny of a single host cell, and the progeny may not necessarily be completely identical (in morphology or in genomic DNA complement) to the original parent cell due to natural, accidental, or deliberate mutation. A host cell includes cells transfected and/or transformed in vivo with a nucleic acid of this disclosure.

[0057] As used herein, “vector” means a construct, which is capable of delivering, and, preferably, expressing, one or more gene(s) or sequence(s) of interest in a host cell. Examples of vectors include, but are not limited to, viral vectors, naked DNA or RNA expression vectors, plasmid, cosmid or phage vectors, DNA or RNA expression vectors associated with cationic condensing agents, DNA or RNA expression vectors encapsulated in liposomes, and certain eukaryotic cells, such as producer cells.

[0058] As used herein, “isolated molecule” (where the molecule is, for example, a polypeptide, a polynucleotide, or fragment thereof) is a molecule that by virtue of its origin or source of derivation (1) is not associated with one or more naturally associated components that accompany it in its native state, (2) is substantially free of one or more other molecules from the same species (3) is expressed by a cell from a different species, or (4) does not occur in nature. Thus, a molecule that is chemically synthesized, or expressed in a cellular system different from the cell from which it naturally originates, will be “isolated” from one or many of its naturally associated components. A molecule also may be rendered substantially free of from one or many of naturally associated components by isolation, using purification techniques well known in the art. Molecule purity or homogeneity may be assayed by a number of means well known in the art. For example, the purity of a polypeptide sample may be assayed using polyacrylamide gel electrophoresis and staining of the gel to visualize the polypeptide using techniques well known in the art. For certain purposes, higher resolution may be provided by using HPLC or other means well known in the art for purification.

[0059] As used herein, the term “isolated”, in the context of viruses, refers to a virus that is derived from a single parental virus. A virus can be isolated using routine methods known to one of skill in the art including, but not limited to, those based on plaque purification and limiting dilution.

[0060] As used herein, the phrase “multiplicity of infection” or “MO” is the average number of viruses per infected cell. The MOI is determined by dividing the number of virus added (ml added×plaque forming units (PFU)) by the number of cells added (ml added×cells/ml).

[0061] As used herein, “purify,” and grammatical variations thereof, refers to the removal, whether completely or partially, of at least one impurity from a mixture containing the polypeptide and one or more impurities, which thereby improves the level of purity of the polypeptide in the composition (i.e., by decreasing the amount (ppm) of impurity(ies) in the composition). As used herein “purified” in the context of viruses refers to a virus which is substantially free of cellular material and culture media from the cell or tissue source from which the virus is derived. The language “substantially free of cellular material” includes preparations of virus in which the virus is separated from cellular components of the cells from which it is isolated or recombinantly produced. Thus, virus that is substantially free of cellular material includes preparations of protein having less than about 30%, 20%, 10%, or 5% (by dry weight) of cellular protein (also referred to herein as a “contaminating protein”). The virus is also substantially free of culture medium, i.e., culture medium represents less than about 20%, 10%, or 5% of the volume of the virus preparation. A virus can be purified using routine methods known to one of skill in the art including, but not limited to, chromatography and centrifugation.

[0062] As used herein, “substantially pure” refers to material which is at least 50% pure (i.e., free from contaminants), more preferably, at least 90% pure, more preferably, at least 95% pure, yet more preferably, at least 98% pure, and most preferably, at least 99% pure.

[0063] The terms “patient”, “subject”, or “individual” are used interchangeably herein and refer to either a human or a non-human animal. These terms include mammals, such as humans, primates, livestock animals (including bovines, porcines, camels, etc.), companion animals (e.g., canines, felines, etc.) and rodents (e.g., mice and rats).

[0064] As used herein, the terms “prevent”, “preventing” and “prevention” refer to the delay of the recurrence or onset of disease, or a reduction in one or more symptoms of a disease (e.g., a poxviral infection) in a subject as a result of the administration of a therapy (e.g., a prophylactic or therapeutic agent). For example, in the context of the administration of a therapy to a subject for an infection, “prevent”, “preventing” and “prevention” refer to the inhibition or a reduction in the development or onset of an infection (e.g., a poxviral infection or a condition associated therewith), or the prevention of the recurrence, onset, or development of one or more symptoms of an infection (e.g., a poxviral infection or a condition associated therewith), in a subject resulting from the administration of a therapy (e.g., a prophylactic or therapeutic agent), or the administration of a combination of therapies (e.g., a combination of prophylactic or therapeutic agents).

[0065] As used herein, the terms “treat”, “treating” or “treatment” refer to treating a condition or patient and refers to taking steps to obtain beneficial or desired results, including clinical results. With respect to infections (e.g., a poxviral infection or a variola virus infection), treatment refers to the eradication or control of the replication of an infectious agent (e.g., the poxvirus or the variola virus), the reduction in the numbers of an infectious agent (e.g., the reduction in the titer of the virus), the reduction or amelioration of the progression, severity, and/or duration of an infection (e.g., a poxviral/variola infection or a condition or symptoms associated therewith), or the amelioration of one or more symptoms resulting from the administration of one or more therapies (including, but not limited to, the administration of one or more prophylactic or therapeutic agents). With respect to cancer, treatment refers to the eradication, removal, modification, or control of primary, regional, or metastatic cancer tissue that results from the administration of one or more therapeutic agents of the disclosure. In certain embodiments, such terms refer to minimizing or delaying the spread of cancer resulting from the administration of one or more therapeutic agents of the invention to a subject with such a disease. In other embodiments, such terms refer to elimination of disease-causing cells.

[0066] “Administering” or “administration of” a substance, a compound or an agent to a subject can be carried out using one of a variety of methods known to those skilled in the art. For example, a compound or an agent can be administered sublingually or intranasally, by inhalation into the lung or rectally. Administering can also be performed, for example, once, a plurality of times, and/or over one or more extended periods. In some aspects, the administration includes both direct administration, including self-administration, and indirect administration, including the act of prescribing a drug. For example, as used herein, a physician who instructs a patient to self-administer a drug, or to have the drug administered by another and/or who provides a patient with a prescription for a drug is administering the drug to the patient.

[0067] Each embodiment described herein may be used individually or in combination with any other embodiment described herein.

### Overview

[0068] Poxviruses are large (˜200 kbp) DNA viruses that replicate in the cytoplasm of infected cells. The Orthopoxvirus (OPV) genus comprises a number of poxviruses that vary greatly in their ability to infect different hosts. Vaccinia virus (VACV), for example, can infect a broad group of hosts, whereas variola virus (VARV), the causative agent of smallpox, only infects humans. A feature common to many, if not all poxviruses, is their ability to non-genetically “reactivate” within a host. Non-genetic reactivation refers to a process wherein cells infected by one poxvirus can promote the recovery of a second “dead” virus (for example one inactivated by heat) that would be non-infectious on its own.

[0069] Purified poxvirus DNA is not infectious because the virus life cycle requires transcription of early genes via the virus-encoded RNA polymerases that are packaged in virions. However, this deficiency can be overcome if virus DNA is transfected into cells previously infected with a helper poxvirus, providing the necessary factors needed to transcribe, replicate, and package the transfected genome in trans (Sam C K, Dumbell K R. Expression of poxvirus DNA in coinfected cells and marker rescue of thermosensitive mutants by subgenomic fragments of DNA. Ann Virol (Inst Past). 1981; 132:135-50). Although this produces mixed viral progeny, the problem can be overcome by performing the reactivation reaction in a cell line that supports the propagation of both viruses, and then eliminating the helper virus by plating the mixture of viruses on cells that do not support the helper virus' growth (Scheiflinger F, Dorner F, Falkner F G. Construction of chimeric vaccinia viruses by molecular cloning and packaging. Proceedings of the National Academy of Sciences of the United States of America. 1992; 89(21):9977-81).

[0070] Previously, Yao and Evans described a method in which the high-frequency recombination and replication reactions catalyzed by a Leporipoxvirus, Shope fibroma virus (SFV), can be coupled with an SFV-catalyzed reactivation reaction, to rapidly assemble recombinant vaccinia strains using multiple overlapping fragments of viral DNA (Yao X D, Evans D H. High-frequency genetic recombination and reactivation of orthopoxviruses from DNA fragments transfected into leporipoxvirus-infected cells. Journal of Virology. 2003; 77(13):7281-90).

### Stem Cells of the Disclosure

[0071] One aspect of the invention provides stem cells comprising a synthetic chimeric poxvirus (scPV), which can be used for the treatment of cancer and infectious diseases. The functional synthetic chimeric poxvirus (scPV) comprised within the stem cells, is initially replicated and assembled from chemically synthesized DNA. The scPV can be any poxvirus whose genome has been sequenced or can be sequenced in large part or for which a natural isolate is available. The viruses that may be produced in accordance with various embodiments of the methods of the invention can be any poxvirus whose genome has been sequenced in large part or for which a natural isolate is available. In some aspects, an scPV of the invention may be based on the genome sequences of naturally occurring strains, variants or mutants, mutagenized viruses or genetically engineered viruses. In some aspects, the viral genome of an scPV of the invention comprises one or more modifications relative to the wild type genome or base genome sequence of said virus. The modifications may include, for example, one or more deletions, insertions, substitutions, or combinations thereof. It is understood that the modifications may be introduced in any number of ways commonly known in the art.

[0072] As used herein, a “stem cell” is any totipotent, pluripotent or multipotent cell that has the ability to differentiate into multiple different types of cells (e.g., terminally differentiated cells). The term “stem cell”, as used herein, refers to a subset of progenitors that have the capacity or potential, under particular circumstances, to differentiate to a more specialized or differentiated phenotype, and which retains the capacity, under certain circumstances, to proliferate without substantially differentiating. In one embodiment, the term stem cell refers generally to a naturally occurring mother cell whose descendants (progeny) specialize, often in different directions, by differentiation, e.g., by acquiring completely individual characters, as occurs in progressive diversification of embryonic cells and tissues. Cellular differentiation is a complex process typically occurring through many cell divisions. A differentiated cell may derive from a multipotent cell which itself is derived from a multipotent cell, and so on. While each of these multipotent cells may be considered stem cells, the range of cell types each can give rise to may vary considerably. Some differentiated cells also have the capacity to give rise to cells of greater developmental potential. Such capacity may be natural or may be induced artificially upon treatment with various factors. In many biological instances, stem cells are also “multipotent” because they can produce progeny of more than one distinct cell type, but this is not required for “stem-ness.” Self-renewal is the other classical part of the stem cell definition, and it is essential as used in this invention. In theory, self-renewal can occur by either of two major mechanisms. Stem cells may divide asymmetrically, with one daughter retaining the stem state and the other daughter expressing some distinct other specific function and phenotype. Alternatively, some of the stem cells in a population can divide symmetrically into two stems, thus maintaining some stem cells in the population as a whole, while other cells in the population give rise to differentiated progeny only. Formally, it is possible that cells that begin as stem cells might proceed toward a differentiated phenotype, but then “reverse” and re-express the stem cell phenotype, a term often referred to as “dedifferentiation” or “reprogramming” or “retrodifferentiation”.

[0073] Any stem cell type can be used in the various aspects of the present invention. Stem cells include any type of stem cell, including embryonic stem cells (ES) cells, post-natal stem cells (e.g. from the umbilical cord and placenta), fetal stem cells and adult stem cells (i.e., somatic stem cells). Other types, such as induced pluripotent stem cells (iPSCs), are produced in the lab by reprogramming adult cells to express ES characteristics. In one embodiment, the adult stem cells are mesenchymal stem cells. In one embodiment, the adult stem cells are tissue or organ specific stem cells such as neuronal stem cells, vascular stem cells, or epidermal stem cells. In a preferred embodiment, the adult stem cells are mesenchymal stem cells (MSC).

[0074] Mesenchymal stem cells can be obtained from a variety of sources such as bone marrow, umbilical cord blood, and adipose tissue (adipose-tissue derived stem cells). Common sources of stem cells are human umbilical vein endothelial cells (HUVEC), and primary human cutaneous microvascular endothelial cells (HCMEC). Analogous non-human stem cells can be obtained from similar non-human sources as well. Stem cells for use in one aspect of the invention may be primary cells or cells that have been maintained in cell culture for an extended period. The stem cells may be obtained from any animal type, including human. In a preferred embodiment, the stem cell is a human cell.

[0075] As used herein, “embryonic stem cells” are stem cells obtained from an embryo that is typically six weeks old or less. Totipotent human embryonic stem cells (hESC) generally can be obtained from embryos that are 5 to 7 days old. Pluripotent human primordial germ cells (hEG) typically can be obtained from embryos that are six weeks old or less. As use herein, “fetal stem cells” refer to any stem cell that is obtained prenatally from a fetus that is typically greater that 6 weeks old. As used herein, “adult stem cells” refers to any stem cell that is obtained from a post-natal subject. Typically, the subject is a full grown adult. Exemplary adult stem cells include, but are not limited to, cells harvested from organs such as fat, muscle or bone marrow.

[0076] In one embodiment, the stem cells are autologous, i.e., the cells are obtained or derived from the subject's own stem cells. In one embodiment, the stem cells of the invention are obtained or derived from a subject who is in need of therapeutic treatment for a cell proliferative disorder (tumor or cancer). The subject may already have the cell proliferative disorder or be at risk for the disorder.

[0077] In another embodiment, the stem cells are allogeneic, i.e., the cells are obtained or derived from a donor whose human leukocyte antigens (HLA) are acceptable matches to the subject's.

[0078] In one aspect, the invention relates to an isolated stem cell or population thereof comprising a synthetic chimeric poxvirus (scPV), wherein the virus is replicated and reactivated from DNA derived from synthetic DNA, the viral genome of said virus differing from a wild type genome of said virus in that it is characterized by one or more modifications.

[0079] In another aspect, the invention relates to an isolated stem cell or population thereof comprising a synthetic chimeric orthopoxvirus, wherein the virus is replicated and reactivated from DNA derived from synthetic DNA, the viral genome of said virus differing from a wild type genome of said virus in that it is characterized by one or more modifications.

[0080] In another aspect, the invention relates to an isolated stem cell or population thereof comprising a synthetic chimeric vaccinia virus, wherein the virus is replicated and reactivated from DNA derived from synthetic DNA, the viral genome of said virus differing from a wild type genome of said virus in that it is characterized by one or more modifications.

[0081] In one aspect, the invention relates to an isolated stem cell or population thereof comprising a synthetic chimeric horsepox virus, wherein the virus is replicated and reactivated from DNA derived from synthetic DNA, the viral genome of said virus differing from a wild type genome of said virus in that it is characterized by one or more modifications.

[0082] In one embodiment, the stem cell of the invention is a non-cancer stem cell.

### Synthetic Chimeric Poxviruses of the Disclosure

[0083] Chemical genome synthesis is particularly useful when a natural template is not available for genetic modification, amplification, or replication by conventional molecular biology methods. For example, a natural isolate of horsepox virus (HPXV) is not readily available to obtain template DNA but the genome sequence for HPXV (strain MNR-76) has been described. The HPXV genome sequence, however, is incomplete. The sequence of the terminal hairpin loops was not determined. Therefore, a functional synthetic chimeric HPXV (scHPXV) can be generated by using terminal hairpin loops based on VACV telomeres in lieu of HPXV terminal hairpin loop sequences. Similarly, the genome sequence for wtVACV (strain NYCBH, clone ACAM2000) has been described and published, though it is not complete. The sequence of the terminal hairpin loops was not determined, only four 54 bp repeat sequences were identified. Therefore, a functional synthetic chimeric VACV ACAM2000 can be generated by using terminal hairpin loops based on a different strain of VACV (such as WR strain) in lieu of VACV ACAM2000 terminal hairpin loop sequences. In other embodiments, the terminal hairpin loops are based on the VACV ACAM2000 terminal hairpin loop sequences.

[0084] In some embodiments, the poxvirus belongs to the Chordopoxvirinae subfamily. In some embodiments, the poxvirus belongs to a genus of Chordopoxvirinae subfamily selected from Avipoxvirus, Capripoxvirus, Cervidpoxvirus, Crocodylipoxvirus, Leporipoxvirus, Molluscipoxvirus, Orthopoxvirus, Parapoxvirus, Suipoxvirus, or Yatapoxvirus. In some embodiments, the poxvirus is an Orthopoxvirus. In some embodiments, the Orthopoxvirus is selected from camelpox virus (CMLV), cowpox virus (CPXV), ectromelia virus (ECTV, “mousepox agent”), HPXV, monkeypox virus (MPXV), rabbitpox virus (RPXV), raccoonpox virus, skunkpox virus, Taterapox virus, Uasin Gishu disease virus, vaccinia virus (VACV), variola virus (VARV) and volepox virus (VPV). In a preferred embodiment, the poxvirus is an HPXV. In another preferred embodiment, the poxvirus is a VACV. In some embodiments, the poxvirus is a Parapoxvirus. In some embodiments, the Parapoxvirus is selected from orf virus (ORFV), pseudocowpox virus (PCPV), bovine popular stomatitis virus (BPSV), squirrel parapoxvirus (SPPV), red deer parapoxvirus, Ausdyk virus, Chamois contagious ecythema virus, reindeer parapoxvirus, or sealpox virus. In some embodiments, the poxvirus is a Molluscipoxvirus. In some embodiments, the Molluscipoxvirus is molluscum contagiousum virus (MCV). In some embodiments, the poxvirus is a Yatapoxvirus. In some embodiments, the Yatapoxvirus is selected from Tanapox virus or Yaba monkey tumor virus (YMTV). In some embodiments, the poxvirus is a Capripoxvirus. In some embodiments, the Capripoxvirus is selected from sheepox, goatpox, or lumpy skin disease virus. In some embodiments, the poxvirus is a Suipoxvirus. In some embodiments, the Suipoxvirus is swinepox virus. In some embodiments, the poxvirus is a Leporipoxvirus. In some embodiments, the Leporipoxvirus is selected from myxoma virus, Shope fibroma virus (SFV), squirrel fibroma virus, or hare fibroma virus. New poxviruses (e.g., Orthopoxviruses) are still being constantly discovered. It is understood that an scPV of the various aspects of the invention may be based on such a newly discovered poxvirus.

[0085] In some aspects, the scPV is a CMLV whose genome is based on a published genome sequence (e.g., strain CMS (Genbank Accession AY009089.1)). In some aspects, the scPV is a CPXV whose genome is based on a published genome sequence (e.g., strain Brighton Red (Genbank Accession AF482758), strain GRI-90 (Genbank Accession X94355)). In some aspects, the scPV is a ECTV whose genome is based on a published genome sequence (e.g. strain Moscow (Genbank Accession NC_004105)). In some aspects, the scPV is a MPXV whose genome is based on a published genome sequence (e.g., strain Zaire-96-1-16 (Genbank Accession AF380138)). In some aspects, the scPV is a RPXV whose genome is based on a published genome sequence (e.g. strain Utrecht (Genbank Accession AY484669)). In some aspects, the scPV is a Taterapox virus whose genome is based on a published genome sequence (e.g., strain Dahomey 1968 (Genbank Accession NC_008291)).

[0086] Chemical viral genome synthesis also opens up the possibility of introducing a large number of useful modifications to the resulting genome or to specific parts of it. The modifications may improve ease of cloning to generate the virus, provide sites for introduction of recombinant gene products, improve ease of identifying reactivated viral clones and/or confer a plethora of other useful features (e.g., introducing a desired antigen, producing an oncolytic virus, etc.). In some embodiments, the modifications may include the attenuation or deletion of one or more virulence factors. In some embodiments, the modifications may include the addition or insertion of one or more virulence regulatory genes or gene-encoding regulatory factors.

[0087] In one aspect, the invention provides polynucleotides for producing a synthetic chimeric horsepox virus (scHPXV). In a specific embodiment, the scHPXV genome may be based on the genome sequence described for HPXV strain MNR-76 (SEQ ID NO: 49) (Tulman E R, Delhon G, Afonso C L, Lu Z, Zsak L, Sandybaev N T, et al. Genome of horsepox virus. Journal of Virology. 2006; 80(18):9244-58). This genome sequence is incomplete and appears not to include the sequence of the terminal hairpin loops. It is shown here that terminal hairpin loops from vaccinia virus (VACV) can be ligated onto the ends of the HPXV genome to produce functional scHPXV particles using the methods of the invention. The HPXV genome may be divided into 10 overlapping fragments as described in the working examples of the disclosure and shown in Table 1. In some embodiments, the genome may be divided into 2, 3, 4, 5, 6, 7, 8, 9, 10, 11, 12, 13, 14, or 15 overlapping fragments. In some embodiments, the entire genome may be provided as one fragment. The genomic locations of the exemplary overlapping fragments and fragment sizes are shown in Table 1. Table 2 shows some of the modifications that may be made in these fragments relative to the base sequence. The polynucleotides of one aspect of the invention comprise nucleic acids sequences that are at least 65%, 70%, 75%, 80%, 85%, 90%, 91%, 92%, 93%, 94%, 95%, 96%, 97%, 98%, 99%, or 100% identical to SEQ ID NOs: 1-10. In some embodiments, an isolated polynucleotide of the invention comprises a variant of these sequences, wherein such variants can include missense mutations, nonsense mutations, duplications, deletions, and/or additions. SEQ ID NO: 11 and SEQ ID NO: 12 depict the nucleotide sequences of VACV (WR strain) terminal hairpin loops. In some embodiments, the terminal hairpin loops comprise nucleic acid sequences that are at least 70%, 75%, 80%, 85%, 90%, 91%, 92%, 93%, 94%, 95%, 96%, 97%, 98%, 99%, or 100% identical to SEQ ID NO: 11 or SEQ ID NO: 12.

[0088] In another aspect, the invention provides polynucleotides for producing a synthetic chimeric vaccinia virus (scVACV). In a specific embodiment, the scVACV genome may be based on the published genome sequence described for VACV strain NYCBH clone ACAM2000 (GenBank accession AY313847; Osborne J D et al. Vaccine. 2007; 25(52):8807-32). This genome sequence is incomplete and appears not to include the sequence of the terminal hairpin loops and only four 54 bp repeat sequences were identified. It is shown in the present application that terminal hairpin loops from vaccinia virus (VACV) strain WR can be ligated onto the ends of the VACV genome strain NYCBH clone ACAM2000 to produce functional scVACV particles using the methods of the disclosure. In some embodiments, the terminal hairpin loops from vaccinia virus (VACV) strain ACAM2000 can be ligated onto the ends of the VACV genome strain NYCBH clone ACAM2000 to produce functional scVACV particles using the methods of the disclosure. The scVACV genome may be divided into 9 overlapping fragments as described in the working examples of the disclosure and shown in Table 4. In some embodiments, the VACV genome may be divided into 2, 3, 4, 5, 6, 7, 8, 9, 10, 11, 12, 13, 14, or 15 overlapping fragments. In some embodiments, the entire genome may be provided as one fragment. The fragment sizes are shown in Table 4. The polynucleotides of one aspect of the invention comprise nucleic acids sequences that are at least 65%, 70%, 75%, 80%, 85%, 90%, 91%, 92%, 93%, 94%, 95%, 96%, 97%, 98%, 99%, or 100% identical to SEQ ID NOs: 54-62. In some embodiments, an isolated polynucleotide of the invention comprises a variant of these sequences, wherein such variants can include missense mutations, nonsense mutations, duplications, deletions, and/or additions. SEQ ID NO: 11 and SEQ ID NO: 12 depict the nucleotide sequences of VACV (WR strain) terminal hairpin loops. SEQ ID NO: 117 and SEQ ID NO: 118 depict the nucleotide sequences of VACV (ACAM2000 strain) terminal hairpin loops. In some embodiments, the terminal hairpin loops comprise nucleic acid sequences that are at least 70%, 75%, 80%, 85%, 90%, 91%, 92%, 93%, 94%, 95%, 96%, 97%, 98%, 99%, or 100% identical to SEQ ID NO: 11 or to SEQ ID NO: 12. In some embodiments, the terminal hairpin loops comprise nucleic acid sequences that are at least 70%, 75%, 80%, 85%, 90%, 91%, 92%, 93%, 94%, 95%, 96%, 97%, 98%, 99%, or 100% identical to SEQ ID NO: 117 or to SEQ ID NO: 118.

[0089] Traditionally, the terminal hairpins of poxviruses have been difficult to clone and sequence, hence, it is not surprising that some of the published genome sequences (e.g., VACV, ACAM 2000 and HPXV MNR-76) are incomplete. The published sequence of the HPXV genome is likewise incomplete, probably missing ˜60 bp from the terminal ends. Thus, the HPXV hairpins cannot be precisely replicated. In an exemplary embodiment, 129 nt ssDNA fragments were chemically synthesized using the published sequence of the VACV terminal hairpins as a guide and ligated onto dsDNA fragments comprising left and right ends of the HPXV genome. Likewise, the genome sequence for wtVACV, strain NYCBH, clone ACAM2000, has been described and published, though it is not complete. The sequence of the terminal hairpin loops was not determined, only four 54 bp repeat sequences were identified. Since the published sequence of the wtVACV strain NYCBH, clone ACAM2000 genome is incomplete, the hairpins cannot be precisely replicated. In an exemplary embodiment, ssDNA fragments were chemically synthesized using the published sequence of the wtVACV WR strain terminal hairpin loops as a guide and ligated onto dsDNA fragments comprising left and right ends of the VACV strain NYCBH.

[0090] In another embodiment, the viral genome of the scPV of the present disclosure comprises homologous or heterologous terminal hairpin loops and the tandem repeat regions (the 70 bp, the 125 bp and the 54 bp tandem repeats) located downstream of the hairpin loops, wherein the tandem repeat regions comprise a different number of repeats than the wtVACV (i.e. the virus present in nature). The number of repeats of the 70 bp, the 125 bp and the 54 bp tandem repeats found in the VACV virus, strain WR were 22, 2 and 8, respectively. In another embodiment, the number of tandem repeat regions are variable in the different poxviruses, in the different vaccinia viruses or in the different vaccinia virus strains. The term “homologous terminal hairpin loops” means that said terminal hairpin loops are coming from the same virus species/the same strain, while the term “heterologous terminal hairpin loops” means that said terminal hairpin loops are coming from a different virus species/different strain.

[0091] In some embodiments, the terminal hairpins of an scPV of the invention are derived from VACV. In some embodiments, the terminal hairpins are derived from CMLV, CPXV, ECTV, HPXV, MPXV, RPXV, raccoonpox virus, skunkpox virus, Taterapox virus, Uasin Gishu disease virus or VPV. In some embodiments, the terminal hairpin loops are based on a strain selected from the group of: Western Reserve, Clone 3, Tian Tian, Tian Tian clone TP5, Tian Tian clone TP3, NYCBH, NYCBH clone Acambis 2000, Wyeth, Copenhagen, Lister, Lister 107, Lister-LO, Lister GL-ONC1, Lister GL-ONC2, Lister GL-ONC3, Lister GL-ONC4, Lister CTC1, Lister IMG2 (Turbo FP635), IHD-W, LC16m18, Lederle, Tashkent clone TKT3, Tashkent clone TKT4, USSR, Evans, Praha, L-IVP, V-VET1 or LIVP 6.1.1, Ikeda, EM-63, Malbran, Duke, 3737, CV-1, Connaught Laboratories, Serro 2, CM-01, NYCBH Dryvax clone DPP13, NYCBH Dryvax clone DPP15, NYCBH Dryvax clone DPP20, NYCBH Dryvax clone DPP17, NYCBH Dryvax clone DPP21, VACV-IOC, Chorioallantois Vaccinia virus Ankara (CVA), Modified vaccinia Ankara (MVA), and MVA-BN. In one embodiment, the terminal hairpin loops are based on the Western Reserve strain (WR strain) of VACV. In another embodiment, the terminal hairpin loops are based on the ACAM2000 strain. New VACV strains are still being constantly discovered. It is understood that an scPV of the various aspects of the invention may be based on such a newly discovered poxviruses or newly discovered strains.

[0092] In some embodiments, the modifications may include the deletion of one or more restriction sites. In some embodiments, the modifications may include the introduction of one or more restriction sites. In some embodiments, the restriction sites to be deleted from the genome or added to the genome may be selected from one or more of restriction sites such as but not limited to AanI, AarI, AasI, AatI, AatII, AbaSI, AbsI, Acc65I, AccI, AccI, AccIII, Aci, AcII, AcuI, AfeI, AflII, AfIHI, AgeI, AhdI, AeI, AluI, AwI, ALwNI, ApaI, ApaLI, ApeKI, ApoI, AscI, AseI, AsiSI, AvaI, AvaII, AvrII, BaeGI, BaeI, BamHI BanI, BanI, BbsI, BbvCI, BbvI, BccI, BceAI, BcgI, BciVI, BcI, BcoDI, BfaI, BfuAI, BfuCI, BglI, BglII, BlpI, BmgBI, BmrI, BmtI, BpmI, Bpu10I, BpuEI, BsaAI, BsaBI, BsaHI, BsaI, BsaJI, BsaWI, BsaXI, BseRI, BseYI, BsgI, BsiEI, BsiHKAI, BsiWI, BsI, BsmAI, BsmBI, BsmFI, BsmI, BsoBI, Bsp1286I, BspCNI, BspDI, BspEI, BspHI, BspMI, BspQI, BsrBI, BsrDI, BsrFa, BsrGI, BsrI, BssHII, BssSa, BstAPI, BstBI, BstEII, BstNI, BstUI, BstX, BstYI, BstZ17I, Bsu36I, BtgI, BtgZI, Btsa, BtsCI, BtsIMutI, Cac8I, ClaI, CspCI, CviAII, CviKI-1, CviQI, DdeI, DpnI, DpnII, DraI, DrdI, EaeI, EagI, EarI, EciI, Eco53kI, EcoNI, EcoO109I, EcoPI5I, EcoRI, EcoRV, FatI, FauI, Fnu4HI, FokI, FseI, FspEI, FspI, HaeII, HaeIII, HgaI, HhaI, HincI, Hindll, Hinfl, HinPl, HpaI, HpaII, HphI, Hpy166II, Hpy188I, Hpy188III, Hpy99I, HpyAV, HpyCH4III, HpyCH4IV, HpyCH4V, I-CeuI, I-SceI, KasI, KpnI, LpnPI, MboI, MboII, MfeI, MuCI, MZuI, MyI, MmeI, MnlI, MscI, MseI, MsI, MspA, MspI, MspJI, MwoI, NaeI, NarI, NciI, NcoI, NdeI, NgoMIV, NheI, NaIII, NaIV, NmeAIII, NotI, NruI, NsiI, NspI, PacI, PaeR7I, PciI, PflFI, PflMI, PleI, PluTI, PmeI, PmI, PpuMI, PshAI, PsiI, PspGI, PspOMI, PspXI, PstI, PvuI, PvuII, RsaI, RsrII, SacI, SacI, SaI, SapI, Sau3AI, Sau96I, Sbfl, ScrFI, SexAI, SfaNI, SfcI, SfiI, SfoI, SgrAI, SmaI, SmlI, SnaBI, SpeI, SphI, SrfI, SspI, StuI, StyD4I, StyI, SwaI, Taqa, TfI, TseI, Tsp45I, TspMI, TspRI, Tth111I, XbaI, XcmI, XhoI, XmaI, XmnI, or ZraI. It is understood that any desired restriction site(s) or combination of restriction sites may be inserted into the genome or mutated and/or eliminated from the genome. In some embodiments, one or more AarI sites are deleted from the viral genome. In some embodiments, one or more BsaI sites are deleted from the viral genome. In some embodiments, one or more restriction sites are completely eliminated from the genome (e.g., all the AarI sites in the viral genome may be eliminated). In some embodiments, one or more AvaI restriction sites are introduced into the viral genome. In some embodiments, one or more Stu sites are introduced into the viral genome. In some embodiments, the one or more modifications may include the incorporation of recombineering targets including, but not limited to, loxP or FRT sites.

[0093] In some embodiments, the modifications may include the introduction of fluorescence markers such as, but not limited to, green fluorescent protein (GFP), enhanced GFP, yellow fluorescent protein (YFP), cyan/blue fluorescent protein (BFP), red fluorescent protein (RFP), or variants thereof, etc.; selectable markers such as but not limited to drug resistance markers (e.g., E. coli xanthine-guanine phosphoribosyl transferase gene (gpt), Streptomyces alboniger puromycin acetyltransferase gene (pac), neomycin phosphotransferase I gene (nptI), neomycin phosphotransferase gene II (nptII), hygromycin phosphotransferase (hpt), sh ble gene, etc.; protein or peptide tags such as but not limited to MBP (maltose-binding protein), CBD (cellulose-binding domain), GST (glutathione-S-transferase), poly(His), FLAG, V5, c-Myc, HA (hemagglutinin), NE-tag, CAT (chloramphenicol acetyl transferase), DHFR (dihydrofolate reductase), HSV (Herpes simplex virus), VSV-G (Vesicular stomatitis virus glycoprotein), luciferase, protein A, protein G, streptavidin, T7, thioredoxin, Yeast 2-hybrid tags such as B42, GAL4, LexA, or VP16; localization tags such as an NLS-tag, SNAP-tag, Myr-tag, etc. It is understood that other selectable markers and/or tags known in the art may be used. In some embodiments, the modifications include one or more selectable markers to aid in the selection of reactivated clones (e.g., a fluorescence marker such as YFP, a drug selection marker such as gpt, etc.) to aid in the selection of reactivated viral clones. In some embodiments, the one or more selectable markers are deleted from the reactivated clones after the selection step.

### Methods of Producing Synthetic Chimeric Poxviruses

[0094] The invention provides, in some aspects, systems and methods for synthesizing, reactivating and isolating functional synthetic chimeric poxviruses (scPVs) from chemically synthesized overlapping double-stranded DNA fragments of the viral genome. Recombination of overlapping DNA fragments of the viral genome and reactivation of the functional scPV are carried out in cells previously infected with a helper virus. Briefly, overlapping DNA fragments that encompass all or substantially all of the viral genome of the scPV are chemically synthesized and transfected into helper virus-infected cells. The transfected cells are cultured to produce mixed viral progeny comprising the helper virus and reactivated scPV. Next, the mixed viral progeny are plated on host cells that do not support the growth of the helper virus but allow the synthetic chimeric poxvirus to grow, in order to eliminate the helper virus and recover the synthetic chimeric poxvirus. In some embodiments, the helper virus does not infect the host cells. In some embodiments, the helper virus can infect the host cells but grows poorly in the host cells. In some embodiments, the helper virus grows more slowly in the host cells compared to the scPV.

[0095] In some embodiments, substantially all of the synthetic chimeric poxvirus genome is derived from chemically synthesized DNA. In some embodiments, about 40%, about 50%, about 60%, about 70%, about 75%, about 80%, about 85%, about 90%, about 95%, about 96%, about 97%, about 98%, about 99%, over 99%, or 100% of the synthetic chimeric vaccinia virus genome is derived from chemically synthesized DNA. In some embodiments, the poxvirus genome is derived from a combination of chemically synthesized DNA and naturally occurring DNA. In some embodiments, all of the fragments encompassing the vaccinia virus genome are chemically synthesized. In some embodiments, one or more of the fragments are chemically synthesized and one or more of the fragments are derived from naturally occurring DNA (e.g., by PCR amplification or by well-established recombinant DNA techniques).

[0096] The number of overlapping DNA fragments used in the various embodiments of the methods of the invention will depend on the size of the poxvirus genome, such as horsepox virus or vaccinia virus. Practical considerations such as reduction in recombination efficiency as the number of fragments increases on the one hand, and difficulties in synthesizing very large DNA fragments as the number of fragments decreases on the other hand, will also inform the number of overlapping fragments used in the methods of the invention. In some embodiments, the synthetic chimeric vaccinia virus genome may be synthesized as a single fragment. In some embodiments, the synthetic chimeric vaccinia virus genome is assembled from 2-14 overlapping DNA fragments. In some embodiments, the synthetic chimeric vaccinia virus genome is assembled from 4-12 overlapping DNA fragments. In some embodiments, the synthetic chimeric vaccinia virus genome is assembled from 6-12 overlapping DNA fragments. In some embodiments, the synthetic chimeric vaccinia virus genome is assembled from 8-11 overlapping DNA fragments. In some embodiments, the synthetic chimeric vaccinia virus genome is assembled from 8-10, 10-12, or 10-14 overlapping DNA fragments. In some embodiments, the synthetic chimeric vaccinia virus genome is assembled from 2, 3, 4, 5, 6, 7, 8, 9, 10, 11, 12, 13, 14, or 15 overlapping DNA fragments. In an exemplary embodiment, the synthetic chimeric vaccinia virus genome is assembled from 9 overlapping DNA fragments. In some embodiments, the synthetic chimeric horsepox virus genome is assembled from 2-14 overlapping DNA fragments. In some embodiments, the synthetic chimeric horsepox virus genome is assembled from 4-12 overlapping DNA fragments. In some embodiments, the synthetic chimeric horsepox virus genome is assembled from 6-12 overlapping DNA fragments. In some embodiments, the synthetic chimeric horsepox virus genome is assembled from 8-11 overlapping DNA fragments. In some embodiments, the synthetic chimeric horsepox virus genome is assembled from 8-10, 10-12, or 10-14 overlapping DNA fragments. In some embodiments, the synthetic chimeric horsepox virus genome is assembled from 2, 3, 4, 5, 6, 7, 8, 9, 10, 11, 12, 13, 14, or 15 overlapping DNA fragments. In an exemplary embodiment of the disclosure, a synthetic vaccinia virus (scVACV) is reactivated from 9 chemically synthesized overlapping double-stranded DNA fragments. In another exemplary embodiment of the disclosure, a synthetic chimeric horsepox virus (scHPXV) is reactivated from 10 chemically synthesized overlapping double-stranded DNA fragments. In some embodiments, terminal hairpin loops are synthesized separately and ligated onto the fragments comprising the left and right ends of the vaccinia virus genome. In some embodiments, terminal hairpin loops may be derived from a naturally occurring template. In some embodiments, the terminal hairpins of an scPV of the disclosure are derived from VACV. In some embodiments, the terminal hairpins are derived from CMLV, CPXV, ECTV, HPXV, MPXV, RPXV, raccoonpox virus, skunkpox virus, Taterapox virus, Uasin Gishu disease virus or VPV. In other embodiments, the terminal hairpins of an scVACV of the invention are derived from wtVACV. In some embodiments, the terminal hairpins are derived from wtVACV terminal hairpins of a different strain in lieu of the VACV own terminal hairpin loop sequences. In some embodiments, the terminal hairpins are based on the terminal hairpins of any wtVACV whose genome has been completely sequenced or a natural isolate of which is available for genome sequencing. In a preferred embodiment, the terminal hairpins are derived from VACV.

[0097] The size of the overlapping fragments used in the various embodiments of the methods of the invention will depend on the size of the poxvirus genome. It is understood that there can be wide variations in fragment sizes and various practical considerations, such as the ability to chemically synthesize very large DNA fragments, will inform the choice of fragment sizes. In some embodiments, the fragments range in size from about 2,000 bp to about 50,000 bp. In some embodiments, the fragments range in size from about 3,000 bp to about 45,000 bp. In some embodiments, the fragments range in size from about 4,000 bp to 40,000 bp. In some embodiments, the fragments range in size from about 5,000 bp to 35,000 bp. In some embodiments, the largest fragments are about 18,000 bp, 20,000 bp, 21,000 bp, 22,000 bp, 23,000 bp, 24,000 bp, 25,000 bp, 26,000 bp, 27,000 bp, 28,000 bp, 29,000 bp, 30,000 bp, 31,000 bp, 32,000 bp, 33,000 bp, 34,000 bp, 35,000 bp, 36,000 bp, 37,000 bp, 38,000 bp, 39,000 bp, 40,000 bp, 41,000 bp, 42,000 bp, 43,000 bp, 44,000 bp, 45,000 bp, 46,000 bp, 47,000 bp, 48,000 bp, 49,000 bp, or 50,000 bp. In an exemplary embodiment of the disclosure, an scVACV is reactivated from 9 chemically synthesized overlapping double-stranded DNA fragments ranging in size from about 10,000 bp to about 32,000 bp (Table 4). In an exemplary embodiment of the disclosure, an scHPXV is reactivated from 9 chemically synthesized overlapping double-stranded DNA fragments ranging in size from about 10,000 bp to about 32,000 bp (Table 1).

[0098] The helper virus may be any poxvirus that can provide the trans-acting enzymatic machinery needed to reactivate a poxvirus from transfected DNA. The helper virus may have a different or narrower host cell range than an scPV to be produced (e.g., Shope fibroma virus (SFV) has a very narrow host range compared to Orthopoxviruses such as vaccinia virus (VACV) or HPXV). The helper virus may have a different plaque phenotype compared to the scPV to be produced. In some embodiments, the helper virus is a Leporipoxvirus. In some embodiments, the Leporipoxvirus is an SFV, hare fibroma virus, rabbit fibroma virus, squirrel fibroma virus, or myxoma virus. In a preferred embodiment, the helper virus is an SFV. In some embodiments, the helper virus is an Orthopoxvirus. In some embodiments, the Orthopoxvirus is a camelpox virus (CMLV), cowpox virus (CPXV), ectromelia virus (ECTV, “mousepox agent”), HPXV, monkeypox virus (MPXV), rabbitpox virus (RPXV), raccoonpox virus, skunkpox virus, Taterapox virus, Uasin Gishu disease virus, VACV and volepox virus (VPV). In some embodiments, the helper virus is an Avipoxvirus, Capripoxvirus, Cervidpoxvirus, Crocodylipoxvirus, Molluscipoxvirus, Parapoxvirus, Suipoxvirus, or Yatapoxvirus. In some embodiments, the helper virus is a fowlpox virus. In some embodiments, the helper virus is an Alphaentomopoxvirus, Betaentomopoxvirus, or Gammaentomopoxvirus. In some embodiments, the helper virus is a psoralen-inactivated helper virus. In an exemplary embodiment of the disclosure, an scPV is reactivated from overlapping DNA fragments transfected into SFV-infected BGMK cells. The SFV is then eliminated by plating the mixed viral progeny on BSC-40 cells.

[0099] The skilled worker will understand that appropriate host cells to be used for the reactivation of the scPV and the selection and/or isolation of the scPV will depend on the particular combination of helper virus and chimeric poxvirus being produced by the methods of the invention. Any host cell that supports the growth of both the helper virus and the scPV may be used for the reactivation step and any host cell that does not support the growth of the helper virus may be used to eliminate the helper virus and select and/or isolate the scPV. In some embodiments, the helper virus is a Leporipoxvirus and the host cells used for the reactivation step may be selected from rabbit kidney cells (e.g., LLC-RK1, RK13, etc.), rabbit lung cells (e.g., R9ab), rabbit skin cells (e.g., SF1Ep, DRS, RAB-9), rabbit cornea cells (e.g., SIRC), rabbit carcinoma cells (e.g., Oc4T/cc), rabbit skin/carcinoma cells (e.g., CTPS), monkey cells (e.g., Vero, BGMK, etc.) or hamster cells (e.g., BHK-21, etc.). In some embodiments, the helper virus is SFV.

[0100] In various aspects, the scPVs of the present invention can be propagated in any substrate that allows the virus to grow to titers that permit the uses of the scPVs described herein. In one embodiment, the substrate allows the scPVs to grow to titers comparable to those determined for the corresponding wild-type viruses. In some embodiments, the scPVs may be grown in cells (e.g., avian cells, bat cells, bovine cells, camel cells, canary cells, cat cells, deer cells, equine cells, fowl cells, gerbil cells, goat cells, human cells, monkey cells, pig cells, rabbit cells, raccoon cells, seal cells, sheep cells, skunk cells, vole cells, etc.) that are susceptible to infection by the poxviruses. Such methods are well-known to those skilled in the art. Representative mammalian cells include, but are not limited to BHK, BGMK, BRL3A, BSC-40, CEF, CEK, CHO, COS, CVI, HaCaT, HEL, HeLa cells, HEK293, human bone osteosarcoma cell line 143B, MDCK, NIH/3T3, Vero cells, etc.). For virus isolation, the scPV is removed from cell culture and separated from cellular components, typically by well-known clarification procedures, e.g., such as gradient centrifugation and column chromatography, and may be further purified as desired using procedures well known to those skilled in the art, e.g., plaque assays.

### Pharmaceutical Composition of the Disclosure

[0101] In one aspect, the invention relates to a pharmaceutical composition comprising the isolated stem cell or population thereof of the invention and a pharmaceutically acceptable carrier.

[0102] The term “pharmaceutically acceptable” means approved by a regulatory agency of the Federal or a state government or listed in the U.S. Pharmacopeia or other generally recognized pharmacopeia for use in animals, and more particularly in humans. The term “carrier” refers to a diluent, adjuvant, excipient, or vehicle with which the pharmaceutical composition (e.g., immunogenic or vaccine formulation) is administered. Saline solutions and aqueous dextrose and glycerol solutions can also be employed as liquid carriers, particularly for injectable solutions. Suitable excipients include starch, glucose, lactose, sucrose, gelatin, malt, rice, flour, chalk, silica gel, sodium stearate, glycerol monostearate, talc, sodium chloride, dried skim milk, glycerol, propylene, glycol, water, ethanol and the like. Examples of suitable pharmaceutical carriers are described in “Remington's Pharmaceutical Sciences” by E. W. Martin. The formulation should suit the mode of administration.

[0103] In some embodiments, the pharmaceutical composition of the invention may be administered by standard routes of administration. Many methods may be used to introduce the formulations into a subject, these include, but are not limited to, intranasal, intratracheal, oral, intradermal, intramuscular, intraperitoneal, intravenous, conjunctival and subcutaneous routes.

### Exemplary Uses

[0104] Method for Delivering the scPV by the Stem Cells of the Disclosure

[0105] In one aspect, the invention relates to a method for delivery of a synthetic chimeric poxvirus (scPV) into a subject, the method comprising infecting the stem cells of the invention with a synthetic chimeric poxvirus and administering the scPV-infected stem cells into the subject.

[0106] Methods to infect the stem cells of the invention with a synthetic chimeric poxvirus are known in the art. Those skilled in the art can determine appropriate parameters, such as number of stem cells and multiplicity of infection.

[0107] In one embodiment, the stem cells are autologous and the invention relates to a method for delivery of a scPV into a subject, the method comprising (a) obtaining the stem cells from said subject; (b) infecting the stem cells with the oncolytic scPV and (c) administer the scPV infected stem cells back into the subject. In another embodiment, the stem cells are mesenchymal stem cells (MSC). In another embodiment, the MSC derive from the subject's adipose tissue.

[0108] In another embodiment, the stem cells are allogeneic and the invention relates to a method for delivery of a scPV into a subject, the method comprising (a) obtaining the stem cells from a subject; (b) infecting the stem cells with the oncolytic scPV and (c) administer the scPV infected stem cells back into the subject.

[0109] In some embodiments, the stem cells of the invention are administered in a single administration or in multiple administrations.

[0110] The stem cells can be implanted locally at the site of cell damage or dysfunction, or systemically. Exemplary routes of administration of the stem cell compositions include, but are not limited to, intravenous, intramuscular, intradermal, intraperitonal, intracoronary, intramyocardial, transendocardial, trans-epicardial, intraspinal, intra-arterial, intra-striatum, intratumoral, topical, transdermal, rectal or sub-epidermal routes. The most suitable route for administration will vary depending upon the disorder or condition to be treated, such as the location of cell damage or dysfunction. For example, stem cells can be administered intraarterially or intra-spinally at the site of injury for the treatment of spinal cord injury. In other examples, stem cell compositions can be administered by an intracoronary, intramyocardial, transendocardial or trans-epicardial route for the treatment of cardiovascular disease. In a preferred embodiment, the administration is intravenously.

[0111] In one embodiment, the amount of scPV used for the stem cells infection is 1×10⁵ or about 1×10⁵ plaque forming units (PFU), 5×10⁵ or about 5×10⁵ PFU, at least 1×10⁶ or about 1×10⁶ PFU, 5×10⁶ or about 5×10⁶ PFU, 1×10⁷ or about 1×10⁷ PFU, 5×10⁷ or about 5×10⁷ PFU, 1×10⁸ or about 1×10⁸ PFU, 5×10⁸ or about 5×10⁸ PFU, 1×10⁹ or about 1×10⁹ PFU, 5×10⁹ or about 5×10⁹ PFU, 1×10¹⁰ or about 1×10¹⁰ PFU or 5×10¹⁰ or about 5×10¹⁰ PFU.

[0112] In one embodiment, the multiplicity of infection of scPV used for the stem cells infection is about 0.5 PFU/cell, or about 1 PFU/cell, or about 2 PFU/cell, or about 3 PFU/cell, or about 4 PFU/cell, or about 5 PFU/cell, or about 6 PFU/cell, or about 7 PFU/cell, or about 8 PFU/cell, or about 9 PFU/cell or about 10 PFU/cell.

### Conditions Susceptible to be Treated by the Exemplary Stem Cells of the Disclosure

[0113] Conditions amenable to stem cell therapy include any in which one or more cell populations are defective or have been depleted or destroyed. Such conditions include degenerative disorders or conditions and acute or chronic injuries. Once the stem cells are implanted or engrafted into the patient, such as at the location of cell or tissue damage or dysfunction, the stem cells can differentiate into the desired cell or tissue type based on the physical and chemical signals in the local extracellular microenvironment, thereby replacing the destroyed or defective cells with functional healthy cells. Exemplary conditions include, but are not limited to, cancer, cardiovascular disease, diabetes, spinal cord injury, neurodegenerative disease, traumatic brain injury, Alzheimer's disease, Parkinson's disease, multiple sclerosis (MS), Amyotrophic lateral sclerosis (ALS), Duchenne Muscular Dystrophy, muscle damage or dystrophy, stroke, burns, lung disease, retinal disease, kidney disease, osteoarthritis, and rheumatoid arthritis.

### Method of Treating Cancer

[0114] As used herein, a method for treating or preventing cancer means that any of the symptoms, such as the tumor, metastasis thereof, the vascularization of the tumors or other parameters by which the disease is characterized are reduced, ameliorated, prevented, placed in a state of remission, or maintained in a state of remission. It also means that the indications of cancer and metastasis can be eliminated, reduced or prevented by the treatment. Non-limiting examples of the indications include uncontrolled degradation of the basement membrane and proximal extracellular matrix, migration, division, and organization of the endothelial cells into new functioning capillaries, and the persistence of such functioning capillaries.

[0115] The synthetic chimeric poxviruses (scPVs) of the various aspects of the invention can be used as oncolytic agents that selectively replicate in and kill cancer cells. Cells that are dividing rapidly, such as cancer cells, are generally more permissive for poxviral infection than non-dividing cells. Many features of poxviruses, such as safety in humans, ease of production of high-titer stocks, stability of viral preparations, and capacity to induce antitumor immunity following replication in tumor cells make poxviruses desirable oncolytic agents. The scPVs produced according to the methods of the invention may comprise one or modifications that render them suitable for the treatment of cancer. Accordingly, in one aspect, the disclosure provides a method of inducing death in cancer cells, the method comprising contacting the cancer cells with an isolated scPV or pharmaceutical composition comprising an scPV of the invention or the stem cells of the invention. In one aspect, the disclosure provides a method of treating cancer, the method comprising administering to a patient in need thereof, a therapeutically effective amount of the stem cells of the invention or the pharmaceutical composition of the invention. Another aspect includes the use of the stem cells of the invention or the pharmaceutical composition described herein to induce death in a neoplastic disorder cell such as a cancer cell or to treat a neoplastic disorder such as cancer. In some embodiments, the poxvirus oncolytic therapy is administered in combination with one or more conventional cancer therapies (e.g., surgery, chemotherapy, radiotherapy, thermotherapy, and biological/immunological therapy). In specific embodiments, the oncolytic virus is a synthetic chimeric VACV (scVACV) of this invention. In some embodiments, the oncolytic virus is a synthetic chimeric myxoma virus of this invention. In some embodiments, the oncolytic virus is a synthetic chimeric HPXV (scHIPXV) of this invention. In some embodiments, the oncolytic virus is a synthetic chimeric raccoonpox virus of this invention. In some embodiments, the oncolytic virus is a synthetic chimeric yaba-like disease virus of this invention.

[0116] In various aspects, using the method of treatment of cancer of this invention, one or more desirable genes can be easily introduced, and one or more undesirable genes can be easily deleted from the synthetic chimeric poxviral genome. In some embodiments, the scPVs of the invention for use as oncolytic agents are designed to express transgenes to enhance their immunoreactivity, antitumor targeting and/or potency, cell-to-cell spread and/or cancer specificity. In some embodiments, an scPV of the invention is designed or engineered to express an immunomodulatory gene (e.g., GM-CSF, or a viral gene that blocks TNF function). In some embodiments, an scPV of the disclosure is designed to include a gene that expresses a factor that attenuates virulence. In some embodiments, an scPV of the invention is designed or engineered to express a therapeutic agent (e.g., hEPO, BMP-4, antibodies to specific tumor antigens or portions thereof, etc.). In some embodiments, the scPVs of the invention have been modified for attenuation. In some embodiments, the scPV of the invention is designed or engineered to lack the viral TK gene. In some embodiments, an scVACV of the invention is designed or engineered to lack vaccinia growth factor gene. In some embodiments, an scVACV of the invention is designed or engineered to lack the hemagglutinin gene.

[0117] The stem cells of the various embodiments of the invention are useful for treating a variety of neoplastic disorders and/or cancers. In some embodiments, the type of cancer includes but is not limited to bone cancer, breast cancer, bladder cancer, cervical cancer, colorectal cancer, esophageal cancer, gliomas, gastric cancer, gastrointestinal cancer, head and neck cancer, hepatic cancer such as hepatocellular carcinoma, leukemia, lung cancer, lymphomas, ovarian cancer, pancreatic cancer, prostate cancer, renal cancer, skin cancer such as melanoma, testicular cancer, etc. or any other tumors or pre-neoplastic lesions that may be treated.

[0118] In another embodiment, the method further comprises detecting the presence of the administered scPV, in the neoplastic disorder or cancer cell and/or in a sample from a subject administered an isolated or recombinant virus or composition described herein. For example, the subject can be tested prior to administration and/or following administration of the scPV or composition described herein to assess for example the progression of the infection. In some embodiments, an scPV of the disclosure comprises a detection cassette and detecting the presence of the administered chimeric poxvirus comprises detecting the detection cassette encoded protein. For example, wherein the detection cassette encodes a fluorescent protein, the subject or sample is imaged using a method for visualizing fluorescence.

[0119] In some embodiments, the stem cells of the various embodiments of the invention are administered in a single administration or in multiple administrations.

[0120] In other embodiments, the stem cells of the invention can be implanted locally at the site of cell damage or dysfunction, or systemically in order to be used in a method to treat cancer. Exemplary routes of administration of the stem cell compositions include, but are not limited to, intravenous, intramuscular, intradermal, intraperitonal, intracoronary, intramyocardial, transendocardial, trans-epicardial, intraspinal, intra-arterial, intra-striatum, intratumoral, topical, transdermal, rectal or sub-epidermal routes. The most suitable route for administration will vary depending upon the disorder or condition to be treated, such as the location of cell damage or dysfunction. For example, stem cells can be administered intraarterially or intra-spinally at the site of injury for the treatment of spinal cord injury. In other examples, stem cell compositions can be administered by an intracoronary, intramyocardial, transendocardial or trans-epicardial route for the treatment of cardiovascular disease. In a preferred embodiment, the administration is intravenously.

[0121] The scPV for use in a method of treatment of cancer can encode a therapeutic gene product. In some examples, the therapeutic gene product is an anti-cancer agent or anti-angiogenic agent. In one embodiment, the therapeutic gene product can be selected from among a cytokine, a chemokine, an immunomodulatory molecule, an antigen, an antibody or fragment thereof, an antisense RNA, a prodrug converting enzyme, an siRNA, an angiogenesis inhibitor, a toxin, an antitumor oligopeptide, a mitosis inhibitor protein, an antimitotic oligopeptide, an anti-cancer polypeptide antibiotic, a transporter protein, and a tissue factor.

[0122] The method for treatment of cancer including the stem cells of the invention can also include administering an anticancer agent. Exemplary anticancer agents include, but are not limited to, a cytokine, a chemokine, a growth factor, a photosensitizing agent, a toxin, an anti-cancer antibiotic, a chemotherapeutic compound, a radionuclide, an angiogenesis inhibitor, a signaling modulator, an antimetabolite, an anti-cancer vaccine, an anti-cancer oligopeptide, a mitosis inhibitor protein, an antimitotic oligopeptide, an anti-cancer antibody, an anti-cancer antibiotic, an immunotherapeutic agent, hyperthermia or hyperthermia therapy, a bacterium, radiation therapy and a combination of such agents. In some examples, the anticancer agent is cisplatin, carboplatin, gemcitabine, irinotecan, an anti-EGFR antibody, or an anti-VEGF antibody. In some examples, the anticancer agent is administered simultaneously, sequentially, or intermittently with the virus.

[0123] In methods provided herein for administering the oncolytic virus to a subject, the method can also include administering an anti-viral agent to attenuate replication of or eliminate the virus from the subject during or following therapy. Exemplary antiviral agents include, but are not limited to, cidofovir, alkoxyalkyl esters of cidofovir, Gleevec, gancyclovir, acyclovir and ST-26.

[0124] In one aspect of the method for treatment of cancer, the scPV contains a gene deletion. A gene deletion is understood to be the loss or absence of a DNA sequence of a gene, or a deficiency in that gene or a deletion mutation, in which part of a chromosome or a sequence of DNA is lost during DNA replication. In one embodiment, the deleted gene is selected from a gene encoding a protein or fragment thereof, a gene segment that regulates transcription, a gene segment that regulates viral replication, a gene segment that affects cellular mitosis, a gene segment that affects cellular metabolism, a gene segment that encodes an antisense RNA, a gene segment that encodes an siRNA, a gene segment that regulates angiogenesis, a gene segment that regulates one or more transporter proteins, or a gene segment that regulates one or more tissue factors. In another embodiment, the gene deletion potentiates the anti-cancer or the anti-angiogenic effect of the virus. The term “potentiates the effect”, as used herein, means that the anti-cancer or the anti-angiogenic compounds are more effective or more active after the gene deletion, which means that the activity of the compounds is augmented after the gene deletion was performed on the scPV.

### Method of Treating a Variola Virus Infection

[0125] The stem cells of the various aspects of the invention can be used to treat a variola virus infection. With respect to infections (e.g., a poxviral infection or a variola virus infection), treatment refers to the eradication or control of the replication of an infectious agent (e.g., the poxvirus or the variola virus), the reduction in the numbers of an infectious agent (e.g., the reduction in the titer of the virus), the reduction or amelioration of the progression, severity, and/or duration of an infection (e.g., a poxviral/variola infection or a condition or symptoms associated therewith), or the amelioration of one or more symptoms resulting from the administration of one or more therapies (including, but not limited to, the administration of one or more prophylactic or therapeutic agents).

[0126] In some embodiments, the stem cells of the invention are administered in a single administration or in multiple administrations for the treatment of a variola infection.

[0127] Exemplary routes of administration of the stem cell compositions include, but are not limited to, intravenous, intramuscular, intradermal, intraperitonal, intracoronary, intramyocardial, transendocardial, trans-epicardial, intraspinal, intra-arterial, intra-striatum, intratumoral, topical, transdermal, rectal or sub-epidermal routes.

### EXAMPLES

### Example 1. Synthetic Chimeric HPXV (scHPXV)

### Selection and Design of Overlapping Fragments of the Viral Genome

[0128] Design of the scHPXV genome was based on the previously described genome sequence for HPXV (strain MNR-76; FIG. 1A) [GenBank accession DQ792504] (Tulman E R, Delhon G, Afonso C L, Lu Z, Zsak L, Sandybaev N T, et al. Genome of horsepox virus. Journal of Virology. 2006; 80(18):9244-58). The 212,633 bp genome was divided into 10 overlapping fragments (FIG. 1B). These fragments were designed so that they shared at least 1.0 kbp of overlapping sequence (i.e. homology) with each adjacent fragment, to provide sites where homologous recombination will drive the assembly of full-length genomes (Table 1). These overlapping sequences will provide sufficient homology to accurately carry out recombination between the co-transfected fragments (Yao X D, Evans D H. High-frequency genetic recombination and reactivation of orthopoxviruses from DNA fragments transfected into leporipoxvirus-infected cells. Journal of Virology. 2003; 77(13):7281-90). The terminal 40 bp from the HPXV genome sequence (5′-TTTATTAAATTTTACTATTTATTTAGTGTCTAGAAAAAAA-3′) (SEQ ID NO: 50) was not included in the synthesized inverted terminal repeat (ITR) fragments. Instead, a SapI restriction site was added at the 5′-terminus (GA_LITR) and 3′-terminus (GA_RITR) of the ITR fragments followed by a TGT sequence. These SapI restriction sites were used to ligate the VACV terminal hairpins onto the ITR fragments (described below).

[0129] Each fragment was chemically synthesized and subcloned into a plasmid using terminal SfiI restriction sites on each fragment. To assist with sub-cloning these fragments, AarI and BsaI restriction sites were silently mutated in all the fragments, except for the two ITR-encoding fragments (Table 2). The BsaI restriction sites in the two ITR-encoding fragments were not mutated, in case these regions contained nucleotide sequence-specific recognition sites that were important for efficient DNA replication and concatemer resolution.

[0130] A yfp/gpt cassette under the control of a poxvirus early late promoter was introduced into the HPXVO95/J2R locus within GA_Fragment_3) so that reactivation of HPXV (scHPXV YFP-gpt::095) was easy to visualize under a fluorescence microscope. The gpt locus also provided a potential tool for selecting reactivated viruses using drug selection. HPXV095 encodes the HPXV homolog of the non-essential VACV J2R gene and by co-transfecting Fragment_3 and other HPXV clones into SFV-infected BGMK cells, along with VACV DNA, a variety of hybrid viruses were recovered, validating the selection strategy (FIGS. 10A and 10B). Silent mutations were also introduced into the HPXV044 (VACV^{WR}F4L) sequence (GA_Fragment_2) to create two unique restrictions sites within GA_Fragment_2 (Table 3). In some embodiments, these unique restriction sites may be used to rapidly introduce recombinant gene products (such as but not limited to, selectable markers, fluorescent proteins, antigens, etc.) into GA_Fragment_2 prior to reactivation of HPXV.

TABLE 1
The HPXV genome fragments used in this study. The size of each
fragment and location within the HPXV genome are indicated.

| | | Location within |
|---|---|---|
| | | HPXV [DQ792504] |
| Fragment Name | Size (bp) | (bp) |
| GA_Left ITR (SEQ ID NO: 1) | 10,095 | 41-10,135 |
| GA_Fragment 1A (SEQ ID NO: 2) | 16,257 | 8505-24,761 |
| GA_Fragment 1B (SEQ ID NO: 3) | 16,287 | 23764-40,050 |
| GA_Fragment 2 (SEQ ID NO: 4) | 31,946 | 38,705-70,650 |
| GA_Fragment 3 (SEQ ID NO: 5) | 25,566 | 68,608-94,173 |
| GA_Fragment 4 (SEQ ID NO: 6) | 28,662 | 92,587-121,248 |
| GA_Fragment 5 (SEQ ID NO: 7) | 30,252 | 119,577-149,828 |
| GA_Fragment 6 (SEQ ID NO: 8) | 30,000 | 147,651-177,650 |
| GA_Fragment 7 (SEQ ID NO: 9) | 28,754 | 176,412-205,165 |
| GA_Right ITR (SEQ ID NO: 10) | 8,484 | 204,110-212,593 |

TABLE 2
Silent mutations created in scHPXV YFP-gpt::095 fragments
to remove AarI and BsaI restriction sites from HPXV genome.

| | | Nucleotide | | | |
|---|---|---|---|---|---|
| | | change in | | | Mutation |
| | Restriction | coding | | Location | verified by |
| | endonuclease | strand of | | in HPXV | whole |
| GA_HPXV | recognition | HPXV | HPXV | genome | genome |
| Fragment | site removed | genome | Gene | [DQ792504] | sequencing |
| GA_Frag_1A | BsaI | A to G | HPXV011a | 11,228 | ✓ |
| GA_Frag_1B | BsaI | A to G | HPXV025 | 27,845 | ✓ |
| GA_Frag_2 | BsaI | A to G | HPXV040 | 41,232 | ✓ |
| | BsaI | G to A | HPXV059 | 56,775 | ✓ |
| | BsaI | G to A | HPXV066 | 67,836 | ✓ |
| GA_Frag_3 | BsaI | G to A | HPXV083 | 84,361 | ✓ |
| | AarI | T to C | HPXV091 | 89,368 | ✓ |
| GA_Frag_4 | BsaI | T to C | HPXV099 | 96,239 | ✓ |
| | BsaI | A to G | HPXV099 | 96,437 | ✓ |
| | BsaI | A to G | HPXV110 | 109,492 | ✓ |
| | BsaI | A to G | HPXV111 | 110,661 | ✓ |
| | BsaI | G to A | HPXV111 | 110,840 | ✓ |
| GA_Frag_4 | BsaI | C to T | HPXV119 | 120,933 | ✓ |
| GA_Frag_5 | | | | | |
| GA_Frag_5 | BsaI | A to G | HPXV123 | 123,035 | ✓ |
| | BsaI | T to C | HPXV145 | 144,834 | ✓ |
| GA_Frag_5 | BsaI | T to C | HPXV146d | 149,727 | ✓ |
| GA_Frag_6 | | | | | |
| GA_Frag_6 | BsaI | G to A | HPXV178b | 175,070 | ✓ |
| GA_Frag_7 | BsaI | G to A | HPXV182 | 180,573 | ✓ |
| | BsaI | A to G | HPXV192 | 187,476 | ✓ |
| | AarI | G to A | HPXV193 | 188,761 | ✓ |
| | BsaI | C to T | HPXV197 | 195,680 | ✓ |
| | AarI | T to C | HPXV200 | 199,873 | ✓ |

TABLE 3
Introduction of silent nucleotide mutations in the HPXV044
(VACV F4L) gene to create unique restriction endonuclease sites in
GA_Fragment_2.

| | Restriction | Nucleotide change | |
|---|---|---|---|
| | endonuclease | in the HPXV | Location in |
| HPXV gene | site created | coding strand | HPXV genome |
| HPXV044 | AvaI | A to C | 44,512 |
| | StuI | A to C | 45,061 |

Synthesis of the Slow (S) and Fast (F) forms of the terminal hairpin loops from VACV (strain WR)

[0131] The Slow (S) and Fast (F) forms of the terminal hairpin loops from VACV (strain WR) were synthesized as 157 nt ssDNA fragments (Integrated DNA Technologies; FIG. 2B). Through DNA synthesis, a 5′ overhang comprised of three nucleotides was left at the end of each hairpin (5′-ACA; FIG. 2C). The concatemer resolution site from the HPXV sequence [DQ792504] was also synthesized in the terminal hairpin loops (FIG. 2B).

Digestion and Purification of scHPXV YFP-Gpt::095 Fragments

[0132] Synthetic HPXV fragments were digested with SfiI overnight at 50° C. The scHPXV ITR fragments were individually digested with SapI (ThermoFisher Scientific) for 1 h, inactivated at 65° C. for 10 minutes, before digestion with SfiI overnight at 50° C. Approximately 1 U of FastAP alkaline phosphatase was added to the scHPXV YFP-gpt::095 ITR digestions and incubated at 37° C. for an additional 1 h. All scHPXV YFP-gpt::095 fragments were subsequently purified using a QiaexII DNA cleanup kit (Qiagen). All scHPXV YFP-gpt::095 fragments were eluted from the QiaexII suspension in 10 mM Tris-HCl. DNA concentrations were estimated using a NanoDrop (ThermoFisher Scientific).

[0133] Poxviruses catalyze very high-frequency homologous recombination reactions that are inextricably linked to the process of virus replication. Herein, it is demonstrated that large fragments of chemically synthesized HPXV duplex DNA can be joined to form a functional scHPXV genome using virus-catalyzed recombination and replication reactions.

[0134] Using the published sequence of the HPXV genome (strain WNR-76), the 212,633 bp genome was divided into 10-overlapping fragments (FIG. 2). All of the BsaI and AarI sites in every fragment except the ITRs were mutated, in case sequence-specific sites within this region are unknowingly required for efficient genome replication and concatemer resolution. As described above, to facilitate the addition of the terminal hairpin loop structures from VACV onto the end of the ITRs, a SapI recognition site was included next to the left- and right-terminal end of both LITR and RITR fragments, respectively (FIG. 2A). These SapI sites were embedded within the flanking vector sequences, and the SapI enzyme cuts downstream of the site, outside of the recognition sequence and in the HPXV DNA. Thus, when DNA was cut with SapI, it left sticky ends within the DNA copied from the HPXV sequence and thus permitted the assembly of a precise sequence copy (through a subsequent ligation), containing no extraneous restriction sites. The other ends of the LITR and RITR fragments (the internal ends with respect to the genome map) were each bounded by SfiI recognition sites, as were both ends of the remaining HPXV fragments. All of these DNAs were supplied in a plasmid form for easy propagation. To prepare the internal fragments for transfection into SFV-infected cells, these plasmids were digested with SfiI to release the plasmid from each scHPXV YFP-gpt::095 fragment (see below for how the LITR and RITR fragments are processed). Following digestion, each reaction was purified to remove any contaminating enzyme, but the plasmid was not removed from the digestion and was co-transfected alongside each scHPXV YFP-gpt::095 fragment. This did not interfere with the reaction and was done to minimize the amount of DNA manipulation and possible fragmentation of these large DNA fragments.

[0135] While the reaction efficiency may be affected by the number of transfected fragments, greater than or less than 10 overlapping fragments may be used in the methods of the disclosure. Without being bound by theory, ˜15 fragments may represent a practical upper limit without further optimization of the reactivation reaction. The ideal lower limit would be a single genome fragment, but in practice the telomeres are most easily manipulated as more modest-sized fragments (e.g., ˜10 kb).

Ligation of VACV F- and S-Terminal Hairpin Loops onto scHPXV YFP-Gpt::095 Left and Right ITR Fragments

[0136] Approximately one microgram of each of the terminal VACV hairpin loops was incubated at 95° C. for 5 minutes followed by a “snap” cool on ice to form the hairpin structure. The hairpin loops were subsequently phosphorylated at their 5′ end before ligation. Briefly, separate 20 μl reactions containing 1 μg of either VACV F-hairpin or VACV S-hairpin, 2 μl of 10×T4 polynucleotide kinase buffer (ThermoFisher Scientific), 1 mM ATP, and 10 units of T4 polynucleotide kinase (ThermoFisher Scientific) were incubated at 37° C. for 1 h. The reaction was terminated by heat inactivation at 75° C.

[0137] Approximately one microgram of either left ITR or right ITR was incubated separately with a 20-fold molar excess of each terminal hairpin in the presence of 5% PEG-4000, and 5 units of T4 DNA ligase overnight at 16° C. Each ligation reaction was heat-inactivated at 65° C. for 10 minutes followed by incubation on ice until ready to transfect into cells.

[0138] Orthopoxviruses encode linear dsDNA genomes bearing variable length inverted terminal repeats (ITR) at each end of the genome. The two strands of the duplex genome are connected by hairpin loops to form a covalently continuous polynucleotide chain. The loops are A+T-rich, cannot form a completely base-paired structure, and exist in two forms that are inverted and complementary in sequence (Baroudy B M, Venkatesan S, Moss B). Incompletely base-paired flip-flop terminal loops link the two DNA strands of the vaccinia virus genome into one uninterrupted polynucleotide chain. Cell. 1982; 28(2):315-24) (FIG. 2B). They are called slow [S] and fast [F] forms based upon their electrophoretic properties and probably fold into partially duplex hairpin structures that cap the ends of the linear dsDNA genome (FIG. 2C). The published sequence of the HPXV genome was incomplete, probably missing ˜60 bp from the terminal ends, making it impossible to precisely replicate the HPXV hairpins. Instead, 157 nt ssDNA fragments were chemically synthesized using the published sequence of the VACV telomeres as a guide and leaving a 5′ overhang comprised of three nucleotides at the end of each hairpin (5′-ACA; FIG. 2C) (Baroudy B M, Venkatesan S, Moss B). Incompletely base-paired flip-flop terminal loops link the two DNA strands of the vaccinia virus genome into one uninterrupted polynucleotide chain. Cell. 1982; 28(2):315-24). This overhang is complementary to the ends generated by cutting cloned LITR and RITR fragments with SapI.

[0139] Sequences derived from VACV were used based upon data suggesting a close common ancestry between HPXV and VACV. It may be possible to use other terminal hairpins from other poxviruses since there are sequence features that are commonly conserved between the hairpin ends of different Chordopoxviruses. For example, the resolution sites in the hairpin ends are highly conserved in both sequence and functionality (they resemble late promoters).

[0140] These single-stranded oligonucleotides were heated to 95° C. and then quickly chilled on ice to form the incompletely base-paired terminal hairpin (FIG. 2C). Next, each oligonucleotide was phosphorylated and ligated separately at 20-fold molar excess with either the left or right ITR fragment previously digested with both SapI and SfiI. Digestion of the ITRs with these enzymes resulted in a 5′-TGT overhang at the 5′ termini of each ITR, which was complementary to the 5′-ACA overhang in the terminal hairpin loop structure. This produced a hairpin-terminated copy of each ITR.

[0141] To confirm that a hairpin-terminated structure was added to both ITR fragments, restriction digestion of the ITR fragments with PvuII was performed. Since it was impossible to visualize the addition of a ˜70 bp terminal hairpin onto the terminus of a ˜10 kb ITR by gel electrophoresis, a small amount of each ligation was digested with PvuII. If no terminal hairpin was ligated to the ITR, then digestion with PvuII resulted in a 1472 bp product (FIG. 3, lanes 2 and 5). If, however, the terminal hairpin loop was successfully added to the HPXV ITRs, then an increase in the size of the ITR fragment was seen on an agarose gel (FIG. 3, compare lane 2 with 3 and 4; compare lane 5 with 6 and 7). These data suggested that under these conditions almost all of the HPXV ITRs contained terminal hairpin loops at one end of the fragment.

Reactivation of scHPXV YFP-Gpt:: 095 from Chemically Synthesized dsDNA Fragments

[0142] SFV strain Kasza and BSC-40 were originally obtained from the American Type Culture Collection. Buffalo green monkey kidney (BGMK) cells were obtained from G. McFadden (University of Florida). BSC-40 and BGMK cells are propagated at 37° C. in 5% CO₂ in minimal essential medium (MEM) supplemented with L-glutamine, nonessential amino acids, sodium pyruvate, antibiotics and antimycotics, and 5% fetal calf serum (FCS; ThermoFisher Scientific).

[0143] Buffalo green monkey kidney (BGMK) cells were grown in MEM containing 60 mm tissue-culture dishes until they reached approximately 80% confluency. Cells were infected with Shope Fibroma Virus (SFV) in serum-free MEM at a MOI of 0.5 for 1 h at 37° C. The inoculum was replaced with 3 ml of warmed MEM containing 5% FCS and returned to the incubator for an additional hour. Meanwhile, transfection reactions were set up as follows. Lipofectamine complexes were prepared by mixing approximately 5 μg total synthetic HPXV DNA fragments in 1 ml Opti-MEM with Lipofectamine2000 diluted in 1 ml Opti-MEM at a ratio of 3:1 (Lipofectamine2000 to total DNA). The complexes were incubated at room temperature for 10 minutes and then added dropwise to the BGMK cells previously infected with SFV. Approximately 16 h post infection, the media was replaced with fresh MEM containing 5% FCS. The cells were cultured for an additional 4 d (total of 5 d) at 37° C. Virus particles were recovered by scraping the infected cells into the cell culture medium and performing three cycles of freezing and thawing. The crude extract was diluted 10² in serum-free MEM and 4 ml of the inoculum was plated on 9-16 150 mm tissue culture plates of BSC-40 cells to recover reactivated scHPXV YFP-gpt::095. One hour post infection, the inoculum was replaced with MEM containing 5% FCS and 0.9% Noble Agar. Yellow fluorescent plaques were visualized under an inverted microscope and individual plaques were picked for further analysis. ScHPXV YFP-gpt::095 plaques were plaque purified three times with yellow fluorescence selection.

[0144] SFV-catalyzed recombination and reactivation of Orthopoxvirus DNA to assemble recombinant vaccinia viruses had previously been described (Yao X D, Evans D H. High-frequency genetic recombination and reactivation of orthopoxviruses from DNA fragments transfected into leporipoxvirus-infected cells. Journal of Virology. 2003; 77(13):7281-90). Construction of recombinant vaccinia viruses using leporipoxvirus-catalyzed recombination and reactivation of orthopoxvirus DNA. Methods Mol Biol. 2004; 269:51-64). Several biological features make this an attractive model system. First, SFV has a narrow host range, productively infecting rabbit cells and certain monkey cell lines, like BGMK. It can infect, but grows very poorly on cells like BSC-40. Second, it grows more slowly compared to Orthopoxviruses, taking approximately 4-5 days to form transformed “foci” in monolayers of cells, a characteristic that is very different from Orthopoxviruses, which produce plaques within 1-2 days in culture. This difference in growth between Leporipoxviruses and Orthopoxviruses allows one to differentiate these viruses by performing the reactivation assays in BGMK cells and plating the progeny on BSC-40 cells. In some embodiments, other helper viruses (such as but not limited to fowlpox virus) may be used. In some embodiments, different cell combinations may be used.

[0145] BGMK cells were infected with SFV at a MOI of 0.5 and then transfected with 5 μg of digested GA_HPXV fragments 2 h later. Five days post transfection all of the infectious particles were recovered by cell lysis and re-plated on BSC-40 cells, which only efficiently supported growth of HPXV (or other Orthopoxviruses). The resulting reactivated scHPXV YFP-gpt::095 plaques were visualized under a fluorescence microscope. The visualization was enabled by the yfp/gpt selectable marker in the HPXV095/J2R locus within Frag_3 (FIG. 2A). Virus plaques were detected in BSC-40 monolayers within 48 h of transfection. The efficiency of recovering scHPXV YFP-gpt::095 was dependent on a number of factors, including DNA transfection efficiency, but ranged up to a few PFU/μg of DNA transfected.

Confirmation of scHPXV YFP-Gpt::095 Genome Sequence by PCR and Restriction Fragment Analysis
PCR and Restriction Digestion Analysis of scHPXV

[0146] To rapidly confirm the presence of scHPXV YFP-gpt::095 in reactivated plaque picks, PCR primers were designed to flank individual BsaI sites that were mutated in the scHPXV (Table 5). Genomic scHPXV YFP-gpt::095 DNA was isolated from BSC-40 cells infected with scHPXV YFP-gpt::095 and used as a template. Genomic DNA from VACV-infected BSC-40 cells was used as a control to confirm the presence of BsaI sites within each PCR product. Following PCR amplification, reactions were subsequently digested with BsaI for 1 h at 37° C. PCR reactions were separated on a 1% agarose gel containing SYBR® safe stain to visualize DNA bands.

[0147] Further analysis of scHPXV YFP-gpt::095 genomes by restriction digestion followed by pulse-field gel electrophoresis (PFGE) was carried out on genomic DNA isolated using sucrose gradient purification (Yao X D, Evans D H. Construction of recombinant vaccinia viruses using leporipoxvirus-catalyzed recombination and reactivation of orthopoxvirus DNA. Methods Mol Biol. 2004; 269:51-64). Briefly, 100 ng of purified viral genomic DNA was digested with 5 U of BsaI or HindIII for 2 h at 37° C. Digested DNA was run on a 1% Seakem Gold agarose gel cast and run in 0.5× tris-borate-EDTA electrophoresis (TBE) buffer [110 mM tris; 90 mM borate; 2.5 mM EDTA]. The DNA was resolved on a CHEF DR-III apparatus (BioRad) at 5.7V/cm for 9.5 h at 14° C., using a switching time gradient of 1 to 10 s, a linear ramping factor, and a 1200 angle. This program allows resolution of DNA species from 1 kbp to >200 kbp. To resolve fragments from 75 bp to 5 kbp, electrophoresis on 1.5% agarose gel cast and run in 1.0×TBE at 115V for 2 h at room temperature was carried out. The DNA was visualized with SYBR® gold stain. The size of digested scHPXV YFP-gpt::095 DNA fragments was compared to control VACV genomic DNA.

TABLE 5
Primers that were used in this study to amplify
regions within VACV and HPXV surrounding the BsaI
restriction sites found in GA_Fragment_1A,
GA_Fragment_1B, GA_Fragment_2, GA_Fragment_3,
GA_Fragment_4, GA_Fragment_5, GA_Fragment_6, and
GA_Fragment_7.

| | | Position | Position |
|---|---|---|---|
| | | of BsaI | of BsaI |
| | Primer | site in | site in |
| | sequence | VACV | HPXV |
| Primer Name | (5′ to 3′) | [NC_006998] | [DQ792504] |
| HPXV 1A-FWD | CTGTATACCCATACT | 16,756 | 27,849 |
| (SEQ ID NO: 13) | GAATTGATGAAC | | |
| HPXV 1A-REV | GAGTTAATATAGACG | | |
| (SEQ ID NO: 14) | ACTTTACTAAAGTCA | | |
| | TG | | |
| HPXV 1B-FWD | GGTTCTTTTTATTCT | 23,076 | N/A |
| (SEQ ID NO: 15) | TTTAAACAGATCAAT | | |
| | GG | | |
| HPXV 1B-REV | TTCTTATTAAGACAT | | |
| (SEQ ID NO: 16) | TGAGCCCAGC | | |
| HPXV 2A-FWD | AGTCATCAATCATCA | 30,073 | 41,225 |
| (SEQ ID NO: 17) | TTTTTTCACC | | |
| HPXV 2A-REV | ATATAACGGACATTT | | |
| (SEQ ID NO: 18) | CACCACC | | |
| HPXV 2B-FWD | GTAACATATACAACT | 45,485 | 56,778 |
| (SEQ ID NO: 19) | TTTATTATGGCGTC | | |
| HPXV 2B-REV | CTAATCCACAAAAAA | | |
| (SEQ ID NO: 20) | TAGAATGTTTAGTTA | | |
| | TTTTG | | |
| HPXV 2C-FWD | AGTGACTGTATCCTC | 56,576 | 67,839 |
| (SEQ ID NO: 21) | AAACATCC | | |
| HPXV 2C-REV | TTTATAAAGGGTTAA | | |
| (SEQ ID NO: 22) | CCTTTGTCACATC | | |
| HPXV 3A-FWD | TTGTGTAGCGCTTCT | 60,981 | N/A |
| (SEQ ID NO: 23) | TTTTAGTC | | |
| HPXV 3A-REV | AAACGGATCCATGGT | | |
| (SEQ ID NO: 24) | AGAATATG | | |
| HPXV 3B-FWD | TATTTGCATCTGCTG | 84,916 | 84,353 |
| (SEQ ID NO: 25) | ATAATCATCC | | |
| HPXV 3B-REV | CGATGGATTCAAATG | | |
| (SEQ ID NO: 26) | ACTTGTTAATG | | |
| HPXV 4A-FWD | ATGCCTTTACAGTGG | 85,101 | 96,243 & |
| (SEQ ID NO: 27) | ATAAAGTTAAAC | | 96,428 |
| HPXV 4A-REV | CTGGATCCTTAGAGT | | |
| (SEQ ID NO: 28) | CTGGAAG | | |
| HPXV 4B-FWD | CGGAAAATGAAAAGG | 98,134 | 109,485 |
| (SEQ ID NO: 29) | TACTAGATACG | | |
| HPXV 4B-REV | TGAATAGCCGTTAAA | | |
| (SEQ ID NO: 30) | TAATCTATTTCGTC | | |
| HPXV 4C-FWD | TATGGATACATTGAT | 99,302 & | 110,653 & |
| (SEQ ID NO: 31) | AGCTATGAAACG | 99,481 | 110,832 |
| HPXV 4C-REV | AATACATCTGTTAAA | | |
| (SEQ ID NO: 32) | ATTGTTTGACCCG | | |
| HPXV 5A-FWD | CATTTTATTTCTAGA | 111,686 | 123,037 |
| (SEQ ID NO: 33) | CGTTGCCAG | | |
| HPXV 5A-REV | CGATATGAAACTTCA | | |
| (SEQ ID NO: 34) | GGCGG | | |
| HPXV 5B-FWD | ACAAAACGATTTAAT | 122,484 | N/A |
| (SEQ ID NO: 35) | TACAGAGTTTTCAG | | |
| HPXV 5B-REV | GTCCGGTATGAGACG | | |
| (SEQ ID NO: 36) | ACAG | | |
| HPXV 5C-FWD | TTAGGGATCACATGA | 133,505 | 144,838 |
| (SEQ ID NO: 37) | ATGAAATTCG | | |
| HPXV 5C-REV | TATGGAAGTTCCGTT | | |
| (SEQ ID NO: 38) | TCATCCG | | |
| HPXV 5D-FWD | GACTTGATAATCATA | 138,306 | 149,718 |
| (SEQ ID NO: 39) | TATTAAACACATTGG | | |
| | ATC | | |
| HPXV 5D-REV | AGATCTCCAGATTTC | | |
| (SEQ ID NO: 40) | ATAATATGATCAC | | |
| HPXV 6A-FWD | ATGATACGTACAATG | 163,521 | 175,062 |
| (SEQ ID NO: 41) | ATAATGATACAGTAC | | |
| HPXV 6A-REV | TGATTTTTGCAATTG | | |
| (SEQ ID NO: 42) | TCAGTTAACACAAG | | |
| HPXV 7A-FWD | TACTGTACCCACTAT | 169,035 | 180,578 |
| (SEQ ID NO: 43) | GAATAACGC | | |
| HPXV 7A-REV | GATATCAACATCCAC | | |
| (SEQ ID NO: 44) | TGAAGAAGAC | | |
| HPXV 7B-FWD | ATCTTACCATGTCCT | 175,849 | 187,467 |
| (SEQ ID NO: 45) | CAAATAAATACG | | |
| HPXV 7B-REV | ATAGCTCTAGGTATA | | |
| (SEQ ID NO: 46) | GTCTGCAAG | | |
| HPXV 7C-FWD | GCGAACTCCATTACA | 181,952 | 195,683 |
| (SEQ ID NO: 47) | CAAATATTTG | | |
| HPXV 7D-REV | GATGTTTCTAAATAT | | |
| (SEQ ID NO: 48) | AGGTTCCGTAAGC | | |

[0148] The genome sequence of virus isolated from plaques grown from the reactivation assay was confirmed by PCR, restriction digestion, and whole genome sequencing. The PCR analysis was based on the mutated BsaI sites within all but the ITR HPXV fragments. Primer sets were designed to flank each BsaI site in scHPXV YFP-gpt::095 (Table 5). It was confirmed that these primer sets would also amplify a similar region within VACV WR. After PCR amplification of an approximate 1 kb region surrounding these mutated BsaI sites within scHPXV YFP-gpt::095, each reaction was digested with BsaI and the resulting DNA fragments were analyzed by gel electrophoresis. Since no BsaI sites were mutated in VACV (wt), enzymatic digestion successfully digested each PCR product, resulting in a smaller DNA fragment. The PCR products generated from scHPXV YFP-gpt::095 genomic DNA were resistant to BsaI digestion, suggesting that the BsaI recognition site was successfully mutated in these genomes. The primer products for primer set 7C did not result in any amplification of DNA in the scHPXV YFP-gpt::095 PP1 and PP3 samples. To confirm whether this primer set was non-functional or if this area of Fragment 7 did not get assembled into the resulting scHPXV YFP-gpt::095 genome, PCR was performed on the original GA_Frag_7 plasmid DNA and this reaction was also unsuccessful in amplifying a product.

[0149] Genomic DNA was next isolated from sucrose-gradient purified scHPXV YFP-gpt::095 genomes, digested with BsaI or HindIII, and separated by agarose gel electrophoresis to confirm that the majority of the BsaI sites in scHPXV YFP-gpt::095 are successfully mutated. Interestingly, undigested genomic DNA from 3 different scHPXV YFP-gpt::095 clones run noticeably slower on a gel compared to VACV, confirming that the genome of scHPXV YFP-gpt::095 (213,305 bp) is larger than VACV-WR (194,711 bp) (FIG. 4A, compare lanes 2-4 with lane 5). The scHPXV YFP-gpt::095 clones were resistant to BsaI digestion, resulting in one large DNA fragment (˜198000 bp) and a smaller DNA fragment at around 4000 bp after separation by PFGE. This is in contrast to the VACV-WR genome, which when digested with BsaI, led to a number of DNA fragments being separated on the gel. Since the expected DNA sizes following digestion of scHPXV YFP-gpt::095 genome with BsaI were relatively small, these digestion products were separated by conventional agarose gel electrophoresis and it was confirmed that the scHPXV YFP-gpt::095 generated the appropriate-sized fragments (FIG. 4B, lanes 2-4). It was also confirmed that scHPXV YFP-gpt::095 produced the correct size of DNA fragments following HindIII digestion, suggesting that these recognitions are maintained during synthesis of the large DNA fragments (FIG. 4A, lanes 12-14; FIG. 4B, lanes 6-8). Overall, in vitro analysis of the scHPXV YFP-gpt::095 genome suggested that reactivation of HPXV from chemically synthesized DNA fragments was successful.

[0150] Since HPXV095 encodes the HPXV homolog of the non-essential VACV J2R gene, by co-transfecting Fragment_3 and other HPXV clones into SFV-infected BGMK cells, along with VACV DNA, a variety of hybrid viruses were recovered, validating the selection strategy (FIGS. 10A and 10B). The first hybrid virus (“VACV/HPXV+fragment 3”) was obtained by co-transfecting VACV DNA with HPXV Frag_3 into SFV-infected cells. The green-tagged insertion encodes the YFP-gpt selection marker. Clones 1-3 were obtained by purifying the DNA from this first hybrid genome and transfecting it again, along with HPXV fragments 2, 4, 5, and 7, into SFV-infected cells. PCR primers were designed to target both HPXV and VACV (Table 5) were used to amplify DNA segments spanning the BsaI sites that were mutated in the scHPXV clones. Following PCR amplification, the products were digested with BsaI to differentiate VACV sequences (which cut) from HPXV (which do not cut). The VACV/HPXV hybrids exhibited a mix of BsaI sensitive and resistant sites whereas the reactivated scHPXV YFP-gpt::095 clone was fully BsaI resistant.

Confirmation of scHPXV YFP-Gt:: 095 Genome Sequence by Whole Genome Sequence Analysis

[0151] Stocks of HPXV YFP-gpt::095 clones (plaque pick [PP] 1.1, PP 2.1, and PP 3.1]) were prepared and purified over sucrose gradients. Viral DNAs were extracted from each purified virus preparation using proteinase K digestion followed by phenol-chloroform extraction. The amount of dsDNA was determined using a Qubit dsDNA HS assay kit (ThermoFisher Scientific). Each viral genome was sequenced at the Molecular Biology Facility (MBSU) at the University of Alberta. Sequencing libraries were generated using the Nextera Tagmentation system (Epicentre Biotechnologies). Approximately 50 ng of each sample was sheared and library prepped for paired end sequencing (2×300 bp) using an Illumina MiSeq platform with an average read depth of 3,100 reads·nt⁻¹ across the genome and ˜190 reads·nt⁻¹ in the F- and S-hairpins.

### Sequence Assembly, Analysis, and Annotation

[0152] Raw sequencing reads were trimmed of low-quality sequence scores and initially mapped to the HPXV reference sequence [GenBank Accession DQ792504] using CLC Genomics Workbench 8.5 software. All nucleotide insertions, deletions, and substitutions within the scHPXV YFP-gpt::095 sequence were verified against the HPXV reference sequence. The Genome Annotation Transfer Utility (GATU) (Tcherepanov V, Ehlers A, Upton C. Genome Annotation Transfer Utility (GATU): rapid annotation of viral genomes using a closely related reference genome. BMC Genomics. 2006; 7:150. Epub 2006/06/15) was used to transfer the reference annotation to the scHPXV genome sequences.

[0153] Purified scHPXV YFP-gpt::095 genomes were sequenced using a multiplex approach and an Illumina MiSeq sequencer. The sequence reads were mapped onto the wild-type HPXV (DQ792504) and scHPXV YFP-gpt::095 reference sequences to confirm the presence of specific modifications in the scHPXV YFP-gpt::095 genome. To confirm that the VACV terminal repeat sequences were correctly ligated onto the terminal end of the left ITR, sequencing reads in this area of the genome were analyzed. A string of Cs was added to the beginning of the scHPXV YFP-gpt::095 genome reference sequence to capture all of the sequence reads that mapped in this region. This was done because the program used to assemble the sequence reads will otherwise truncate the display of sequences at the point where the scHPXV YFP-gpt::095 genome reference sequence ends.

[0154] It was clear from the mapped reads that although the SapI recognition site was present in the scHPXV YFP-gpt::095 reference genome, all of the sequencing reads lacked this sequence. This confirmed that the approach described herein produces an authentic HPXV sequence at the site where the synthetic hairpin was ligated to the ends of the ITRs. The complete sequence of the VACV WR terminal hairpin loop was also successfully obtained, which proved to be identical to the sequence of the synthetic ssDNA that was ligated onto the TIR ends. Overall, these data suggested that the VACV-WR terminal hairpin loops were successfully ligated onto the HPXV ITR sequences and recovered in the infectious viruses. Moreover, the 1:1 distribution of F- and S-read in each of five viruses suggested that both ends were required to produce a virus.

[0155] Next, it was verified that each nucleotide substitution to silently mutate the BsaI sites had correctly been incorporated into the scHPXV YFP-gpt::095 genome. Sequencing reads were mapped to the HPXV (DQ792504) reference sequence. The overall Illumina sequencing read coverage in scHPXV YFP-gpt::095 from region 96,050 to 96,500 is shown in FIG. 5A. It was clear from here that there were two conflicts in this region that did not align correctly with reference HIPXV (FIG. 5A, blue and yellow vertical lines). Upon magnification of these regions it was clear that at position 96,239 there was a T to C substitution (FIG. 5B) and at position 96,437 there was an A to G substitution (FIG. 5C) in the scHPXV YFP-gpt::095 genome. It was verified that all of the nucleotide substitutions that were introduced in order to mutate the selected BsaI and AarI recognition sites were created in the scHPXV YFP-gpt::095 genome (Table 2).

[0156] Finally, it was determined that the nucleotide substitutions in HPXV044, designed to create unique restriction sites in GA_Frag_2, were also incorporated into the scHPXV YFP-gpt::095 genome. The sequencing reads that map to HPXV044 (region 44,400 to 45,100) showed that within this region there were two regions where the sequencing reads conflicted with that of the sequence in the HPXV YFP-gpt::095 reference sequence. Upon magnification of these regions, it was clear that two T to G substitutions were introduced into the non-coding strand of HPXV044 at positions 44,512 and 45,061, thus creating AvaI and StuI restriction sites in Frag_2. Overall, the sequencing data corroborated the in vitro genomic analysis data and confirmed that scHPXV YFP-gpt::095 was successfully reactivated in SFV-infected cells.

scHPXV YFP-Gpt:: 095 Replicates More Slowly in HeLa Cells Compared to Other Poxviruses

[0157] BSC-40, HeLa, and HEL fibroblasts were originally obtained from the American Type Culture Collection. BSC-40 cells are propagated at 37° C. in 5% CO₂ in minimal essential medium (MEM) supplemented with L-glutamine, nonessential amino acids, sodium pyruvate, antibiotics and antimycotics, and 5% fetal calf serum (FCS; ThermoFisher Scientific). HeLa and HEL cells were propagated at 37° C. in 5% CO₂ in Dulbecco's modified Eagle's medium supplemented with L-glutamine, antibiotics and antimycotics, and 10% FCS.

[0158] Multi-step growth curves and plaque size measurements were used to evaluate whether scHPXV YFP-gpt::095 replicated and spread in vitro similar to other Orthopoxviruses. Since a natural HPXV isolate was unavailable, the growth of scHPXV YFP-gpt::095 was compared to the prototypic poxvirus, VACV (strain WR), Cowpox virus (CPX), a poxvirus that was closely related to HPXV and a clone of Dryvax virus, DPP15. Monkey kidney epithelial cells (BSC-40), Vero cells, a human carcinoma cell line (HeLa), and primary human fibroblasts cells (HEL) were infected with VACV WR, CPX, DPP15, or scHPXV YFP-gpt::095 at a low MOI and infected cells were harvested over a 72 h time course. In BSC-40 cells, the rate of virus replication and spread was comparable among all viruses tested (FIG. 8A). Importantly, scHPXV YFP-gpt::095 replicated as well as any of the other poxviruses tested. The virus grew to somewhat lower titers on HEL cells and Vero cells, and least well on HeLa cells. In HeLa cells, up to a 1.5-log decrease in virus production was seen compared to other Orthopoxviruses.

[0159] Next, the plaque size of scHPXV YFP-gpt::095 grown in BSC-40 cells was measured. A statistically significant decrease in plaque size of scHPXV YFP-gpt::095 compared to VACV WR and even cowpox virus (FIG. 6B) was observed. Interestingly, in BSC-40 cells, scHPXV YFP-gpt::095 produced the smallest plaques when compared to all other Orthopoxviruses tested (FIG. 6C). Also, while different VACV strains produced extracellular viruses that form smaller secondary plaques, these were not produced by scHPXV YFP-gpt::095 (FIG. 6C). Overall, these data suggested that reactivation of scHPXV YFP-gpt::095 using the system described herein did not introduce any obvious defects in virus replication and spread in vitro when compared to other Orthopoxviruses. Moreover, the plaque size of scHPXV YFP-gpt::095 was similar to that of cowpox virus (CPXV), suggesting that synthetic virus reactivation did not have any deleterious effects on the small plaque phenotype that had previously been observed with other HPXV-like clones (Medaglia M L, Moussatche N, Nitsche A, Dabrowski P W, Li Y, Damon I K, et al. Genomic Analysis, Phenotype, and Virulence of the Historical Brazilian Smallpox Vaccine Strain IOC: Implications for the Origins and Evolutionary Relationships of Vaccinia Virus. Journal of Virology. 2015; 89(23):11909-25).

### Removal of Yfp/Gpt Selection Marker

[0160] Following reactivation of the scHPXV YFP-gpt::095, the yfp/gpt selection marker in the HPXV095 locus was removed. To do this, a 1349 bp region of sequence corresponding to nucleotide positions 91573 to 92921 in HPXV (DQ792504) was synthesized (ThermoFisher Scientific) (SEQ ID NO: 51). This fragment included approximately 400 bp of homology flanking either side of the wt HPXVO95/J2R gene. This sequence of DNA was cloned into a commercial vector provided by GeneArt. To replace the yfp/gpt cassette with the HPXV095 gene sequence, BSC-40 cells were infected with scHPXV YFP-gpt::095 at a MOI of 0.5 and then transfected, 2 h later, with 2 μg of linearized plasmid containing the wtHPXV095 sequence using Lipofectamine 2000 (ThermoFisher Scientific). The virus recombinants were harvested 48 h post infection and recombinant viruses (scHPXV (wt)) were isolated using three rounds of non-fluorescent plaque purification under agar. PCR was used to confirm the identity of the scHPXV (wt) using primers that flanked the HPXV095 gene locus. The primers used to confirm the correct replacement of the HPXV095 gene are HPXV095_check-FWD 5′-CCTATTAGATACATAGATCCTCGTCG-3′ (SEQ ID NO: 52) and HPXV095_check-REV 5′-CGGTTTATCTAACGACACAACATC-3′ (SEQ ID NO: 53).

Growth Properties of scHPXV (Wt) Versus scHPXV YFP-Gpt::095

[0161] In experiments performed as described above, scHPXV(wt) shows growth properties not significantly different from scHPXV YFP-gpt::095 in vitro (FIG. 11A-C). A statistically significant decrease in plaque size of scHPXV(wt) compared to VACV WR was observed (FIG. 11A). scHPXV (wt), like scHPXV YFP-gpt::095, did not produce extracellular viruses (FIG. 11B) and there were no significant differences in the growth of scHPXV (wt) and scHPXV YFP-gpt::095 on BSC-40 cells, HEL cells, HeLA cells, and Vero cells (FIG. 11C). The finding that scHPXV(wt) did not produce extracellular viruses was of relevance given that this property affects virulence.

Determination of the Virulence of scHPXV (Wt) in a Murine Intranasal Model

[0162] The toxicity effects of scHPXV (wt) were determined in this study. For this experiment, 6 groups of Balb/c mice were administered 3 different doses of scHPXV (ΔHPXV_095/J2R) or scHPXV (wt) described in the Examples and compared to a PBS control group as well as a VACV (WR) control group and a VACV (Dryvax strain DPP15) control group (9 treatment groups in total). There were 3 additional mice included in this experiment that did not receive any treatment for the duration of the study. All mice were sampled for blood at predetermined points throughout the experiment and the additional mice served as a baseline for serum analysis.

[0163] Prior to inoculation of Balb/c mice, all virus strains were grown in BSC-40 cells (African green monkey kidney), harvested by trypsinization, washed in PBS, extracted from cells by dounce homogenization, purified through a 36% sucrose cushion by ultracentrifugation, resuspended in PBS, and titered such that the final concentrations were: 1) VACV (WR)—5×10⁵ PFU/ml; 2) VACV (DPP15)—10⁹ PFU/ml; 3) scHPXV (ΔHPXV_095/J2R)—10⁷ PFU/ml, 10⁸ PFU/ml, and 10⁹ PFU/ml and 4) scHPXV (wt)—10⁷ PFU/ml, 10⁸ PFU/ml, and 10⁹ PFU/ml.

[0164] The scHPXV doses chosen for this study (10⁵ PFU/dose, 10⁶ PFU/dose, and 10⁷ PFU/dose) were based on previous studies using known vaccine strains of VACV, including Dryvax and IOC (Medaglia M L, Moussatche N, Nitsche A, Dabrowski P W, Li Y, Damon I K, et al. Genomic Analysis, Phenotype, and Virulence of the Historical Brazilian Smallpox Vaccine Strain IOC: Implications for the Origins and Evolutionary Relationships of Vaccinia Virus. Journal of Virology. 2015; 89(23):11909-25; Qin L, Favis N, Famulski J, Evans D H. Evolution of and evolutionary relationships between extant vaccinia virus strains. Journal of Virology. 2015; 89(3):1809-24).

[0165] Since weight loss was used as a measurement of virulence in mice, VACV (strain WR) was administered intranasally at a dose of 5×10³ PFU, which led to approximately 20-30% weight loss. The VACV Dryvax clone, DPP15, was also administered intranasally at 10⁷ PFU/dose, so that the virulence of this well-known Smallpox vaccine could be directly compared to scHPXV (wt). Mice were purchased from Charles River Laboratories and once received, were acclimatized to their environment for at least one week prior to virus administration.

[0166] Each mouse received a single dose of virus (˜10 ul) administered via the intranasal injection while under anesthesia. Mice were monitored for signs of infection, such as swelling, discharge, or other abnormalities every day for a period of 30 days. Each mouse was specifically monitored for weight loss every day after virus administration. Mice that lose more than 25% of their body weight in addition to other morbidity factors were subjected to euthanasia in accordance with our animal health care facility protocols at the University of Alberta.

[0167] Even at the highest doses of scHPXV tested, there may be no overt signs of illness in Balb/c mice. The VACV strains most closely related to scHPXV, old South American viruses, in some cases produced no disease at 10⁷ PFU (Medaglia M L, Moussatche N, Nitsche A, Dabrowski P W, Li Y, Damon I K, et al. Genomic Analysis, Phenotype, and Virulence of the Historical Brazilian Smallpox Vaccine Strain IOC: Implications for the Origins and Evolutionary Relationships of Vaccinia Virus. Journal of Virology. 2015; 89(23):11909-25). It was impractical to test much higher doses than this due to the difficulty of making purified stocks with titers in excess of 10⁹ PFU/mL.

Determination of Whether scHPXV Confers Immune Protection Against a Lethal VACV-WR Challenge

[0168] Mice that appeared to have been unaffected by the initial virus administration described in the Example continued to gain weight normally throughout the experiment. Thirty days post virus inoculation, mice were subsequently challenged with a lethal dose of VACV-WR (10⁶ PFU/dose) via intranasal inoculation. Mice were closely monitored for signs of infection as described above. Mice were weighed daily and mice that lost greater than 25% of their body weight in addition to other morbidity factors were subjected to euthanasia. We expected that mice inoculated with PBS prior to administration of a lethal dose of VACV-WR showed signs of significant weight loss and other morbidity factors within 7-10 days post inoculation. Approximately 14 days post lethal challenge with VACV-WR, all mice were euthanized and blood was collected to confirm the presence of VACV-specific neutralizing antibodies in the serum by standard plaque reduction assays.

### Example 2. Synthetic Chimeric VACV (scVACV)

[0169] Synthetic Chimeric VACV ACAM2000 Containing VACV WR Strain Hairpin and Duplex Sequence (scVACVACAM2000-WR DUP/HP)

[0170] The design of the scVACV genome was based on the previously described genome sequence for VACV ACAM2000 [GenBank accession AY313847] (Osborne J D et al. Vaccine. 2007; 25(52):8807-32). The genome was divided into 9 overlapping fragments (FIG. 12). These fragments were designed so that they shared at least 1.0 kbp of overlapping sequence (i.e. homology) with each adjacent fragment, to provide sites where homologous recombination will drive the assembly of full-length genomes (Table 4). These overlapping sequences provided sufficient homology to accurately carry out recombination between the co-transfected fragments (Yao X D, Evans D H. Journal of Virology. 2003; 77(13):7281-90).

TABLE 4
The VACV ACAM2000 genome fragments used in this study.
The size and the sequence within the VACV ACAM2000
genome [GenBank Accession AY313847] are described.

| Fragment Name | Size (bp) | Sequence |
|---|---|---|
| GA_LITR | 18,525 | SEQ ID NO: 54 |
| ACAM2000 | | |
| GA_FRAG_1 | 24,931 | SEQ ID NO: 55 |
| ACAM2000 | | |
| GA_FRAG_2 | 23,333 | SEQ ID NO: 56 |
| ACAM2000 | | |
| GA_FRAG_3 | 26,445 | SEQ ID NO: 57 |
| ACAM2000 | | |
| GA_FRAG_4 | 26,077 | SEQ ID NO: 58 |
| ACAM2000 | | |
| GA_FRAG_5 | 24,671 | SEQ ID NO: 59 |
| ACAM2000 | | |
| GA_FRAG_6 | 25,970 | SEQ ID NO: 60 |
| ACAM2000 | | |
| GA_FRAG_7 | 28,837 | SEQ ID NO: 61 |
| ACAM2000 | | |
| GA_RITR | 17,640 | SEQ ID NO: 62 |
| ACAM2000 | | |

[0171] To assist with sub-cloning of these fragments, AarI and BsaI restriction sites were silently mutated in all the fragments, except for the two ITR-encoding fragments. The BsaI restriction sites in the two ITR-encoding fragments were not mutated, in case these regions contain nucleotide sequence-specific recognition sites that are important for efficient DNA replication and concatamer resolution.

[0172] A YFP/gpt cassette under the control of a poxvirus early late promoter was introduced into the thymidine kinase locus, so that reactivation of VACV ACAM2000 (VACV ACAM2000 YFP-gpt::105) was easy to visualize under a fluorescence microscope. The gpt locus also provided a potential tool for selecting reactivated viruses using drug selection.

[0173] Traditionally, the terminal hairpins have been difficult to clone and sequence, hence, it is not surprising that the published sequence of the VACV ACAM2000 genome is not complete. Upon inspection of the very terminal region of the published VACV ACAM2000 strain, there appeared to be some differences between ACAM2000 and the very well characterized VACV WR strain (Genbank Accession #AY243312) (FIG. 12). In the WR strain, there are 70 bp tandem repeat sequences immediately downstream of the covalently closed hairpin loop that is located at the terminal 5′ and 3′ termini of the VACV genome. These are followed by two 125 bp repeat sequences and eight 54 bp repeat sequences (FIG. 13A). In the published VACV ACAM2000 sequence, however, only four 54 bp repeat sequences were identified. The presence of the 70 bp, 125 bp, and 54 bp repeat sequences was confirmed in a wild-type isolate of VACV ACAM2000 after sequencing (using Illumina), indicating that the current published sequence of ACAM2000 is incomplete. Due to the short read lengths of the Illumina reads (<300 nucleotides), the inventors were unable to accurately determine what the actual ACAM2000 genomic sequence was in this 3 kbp. Instead, the inventors decided to recreate a VACV ACAM2000 virus that had a similar sequence to VACV WR from the terminal hairpin to just before the stop codon of the C23L gene (FIG. 12). This included both the 125 bp and 54 bp tandem repeat sequences that, although not included in the published ACAM2000 sequence, were detected when next generation Illumina sequencing of the wtVACV ACAM2000 was performed. At the 5′ termini of the modified VACV ACAM2000 left and right ITR fragments an NheI restriction site was also included, that would allow to directly attach the 70 bp tandem repeat sequence to the ITR ends (discussed above). The F and S terminal hairpin loop sequences of the wtVACV WR strain are shown in SEQ ID NO: 11 and 12, respectively.

Synthetic Chimeric VACV ACAM2000 Containing VACV ACAM2000 Strain Hairpin and Duplex Sequence (scVACVACAM2000-ACAM2000 DUP/HP)

[0174] The design of the scVACV genome was based on the previously described genome sequence for VACV ACAM2000 [GenBank accession AY313847] (Osborne J D et al. Vaccine. 2007; 25(52):8807-32). The genome was divided into 9 overlapping fragments (FIG. 12). These fragments were designed so that they shared at least 1.0 kbp of overlapping sequence (i.e. homology) with each adjacent fragment, to provide sites where homologous recombination will drive the assembly of full-length genomes (Table 4). These overlapping sequences provided sufficient homology to accurately carry out recombination between the co-transfected fragments (Yao X D, Evans D H. Journal of Virology. 2003; 77(13):7281-90).

[0175] To assist with sub-cloning of these fragments, AarI and BsaI restriction sites were silently mutated in all the fragments, except for the two ITR-encoding fragments. The BsaI restriction sites in the two ITR-encoding fragments were not mutated, in case these regions contain nucleotide sequence-specific recognition sites that are important for efficient DNA replication and concatemer resolution.

[0176] A YFP/gpt cassette under the control of a poxvirus early late promoter was introduced into the thymidine kinase locus, so that reactivation of VACV ACAM2000 (VACV ACAM2000 YFP-gpt::105) was easy to visualize under a fluorescence microscope. The gpt locus also provided a potential tool for selecting reactivated viruses using drug selection.

[0177] The F and S terminal hairpin loop sequences of the wtVACV ACAM2000 are shown in SEQ ID NO: 118 and 117, respectively.

Ligation of the VACV WR F and S Terminal Hairpin Loops onto the VACV ACAM2000 Right and Left ITR Fragments

[0178] A 70 bp repeat fragment that was identical to the VACV WR strain was synthesized (FIG. 13A; SEQ ID NO: 63). SapI and NheI restriction sites were included at the 5′ and 3′ terminus of the 70 bp tandem repeat fragment to facilitate the ligation onto the VACV WR hairpin sequence and the VACV ACAM2000 right and left ITR fragments, respectively. Before the VACV WR terminal hairpin loops could be ligated onto the 70 bp tandem repeat fragment, the loop had to be extended an additional 58 bp using a duplex sequence synthesized by IDT. This was due to the extra sequence being immediately downstream of the concatemer resolution site, prior to the first 70 bp repeat sequence found in VACV strain WR. The duplex sequence was produced by synthesizing two single-stranded DNA molecules that, when annealed together, would produce a duplex DNA molecule with a 5′-TGT overhang at the 5′ end and a 5′-GGT overhang at the 3′ end (SEQ ID NO: 64 and SEQ ID NO: 65). Since the VACV WR F and S terminal hairpin loops generate a 3′-ACA overhang at their terminal loops, the 58 bp duplex was ligated to the hairpins to generate an ˜130 bp terminal hairpin loop that looked identical to the sequence found in the VACV WR strain up until the beginning of the 70 bp repeat sequence. This hairpin/duplex fragment was gel purified and then subsequently ligated onto the SapI digested end of the 70 bp repeat fragment. Digesting the 70 bp tandem repeat fragment with SapI created a three base overhang (5′-CCA), complementary to the 5′GGT overhang in the terminal hairpin/duplex structure. The 70 bp tandem repeat was mixed with either an F terminal hairpin/duplex structure or a S terminal hairpin/duplex structure at a ˜5-fold molar excess relative to the 70 bp tandem repeat fragment in the presence of DNA ligase. This produced an upward shift in the DNA electrophoresis gel compared to the 70 bp only reaction, indicating that the terminal hairpin/duplex was successfully ligated onto the 70 bp tandem repeat fragment.

[0179] This terminal hairpin/duplex/70 bp tandem repeat fragment was subsequently ligated onto the 70 bp ACAM2000 left or right ITR fragment that had been previously modified at their terminal ends to include the NheI restriction site. When this fragment was digested, a 5′-CTAG overhang was left at their 5′ termini. At the 3′ terminus of the 70 bp tandem repeat fragment, the NheI site is used to directly ligate this fragment to the LITR and RITR regions of the VACV ACAM2000 DNA fragments. Following digestion of the VACV ACAM2000 left and right ITR fragments, the S terminal hairpin/duplex/70 bp tandem repeat fragment or the F terminal hairpin/duplex/70 bp tandem repeat fragment were separately ligated to either the left or right ITR fragment using DNA ligase at a 1:1 molar ratio overnight at 16° C. The DNA ligase was subsequently heat inactivated at 65° C. prior to being transfected into Shope Fibroma virus (SFV)-infected BGMK cells.

Ligation of the VACV ACAM2000 F and S Terminal Hairpin Loops onto the VACV ACAM2000 Right and Left ITR Fragments

[0180] A 70 bp repeat fragment that was identical to the VACV ACAM2000 strain was synthesized. SapI and NheI restriction sites were included at the 5′ and 3′ terminus of the 70 bp tandem repeat fragment to facilitate the ligation onto the VACV ACAM2000 hairpin sequence and the VACV ACAM2000 right and left ITR fragments, respectively. Before the VACV ACAM2000 terminal hairpin loops could be ligated onto the 70 bp tandem repeat fragment, the loop had to be extended an additional 58 bp using a duplex sequence synthesized by IDT Technologies. This was due to the extra sequence being immediately downstream of the concatemer resolution site, prior to the first 70 bp repeat sequence found in VACV strain ACAM2000. The duplex sequence was produced by synthesizing two single-stranded DNA molecules that, when annealed together, would produce a duplex DNA molecule with a 5′-TGT overhang at the 5′ end and a 5′-GGT overhang at the 3′ end (SEQ ID NO: 119 and SEQ ID NO: 120). Since the VACV ACAM2000 F and S terminal hairpin loops generate a 3′-ACA overhang at their terminal loops, the 58 bp duplex was ligated to the hairpins to generate an ˜130 bp terminal hairpin loop. This hairpin/duplex fragment was gel purified and then subsequently ligated onto the SapI digested end of the 70 bp repeat fragment. Digesting the 70 bp tandem repeat fragment with SapI created a three-base overhang (5′-CCA), complementary to the 5′GGT overhang in the terminal hairpin/duplex structure. The 70 bp tandem repeat was mixed with either an F terminal hairpin/duplex structure or a S terminal hairpin/duplex structure at a ˜5-fold molar excess relative to the 70 bp tandem repeat fragment in the presence of DNA ligase. This produced an upward shift in the DNA electrophoresis gel compared to the 70 bp only reaction, indicating that the terminal hairpin/duplex was successfully ligated onto the 70 bp tandem repeat fragment.

[0181] This terminal hairpin/duplex/70 bp tandem repeat fragment was subsequently ligated onto the ACAM2000 left or right ITR fragment that had been previously modified at their terminal ends to include the NheI restriction site. When this left or right ITR fragment was digested, a 5′-CTAG overhang was left at their 5′ termini. At the 3′ terminus of the 70 bp tandem repeat fragment, the NheI site is used to directly ligate this fragment to the LITR and RITR regions of the VACV ACAM2000 DNA fragments. Following digestion of the VACV ACAM2000 left and right ITR fragments, the S terminal hairpin/duplex/70 bp tandem repeat fragment or the F terminal hairpin/duplex/70 bp tandem repeat fragment were separately ligated to either the left or right ITR fragment using DNA ligase at a 1:1 molar ratio overnight at 16° C. The DNA ligase was subsequently heat inactivated at 65° C. prior to being transfected into Shope Fibroma virus (SFV)-infected BGMK cells.

### Preparation of the VACVACAM2000 Overlapping DNA Fragments

[0182] Each of the VACV ACAM2000 overlapping DNA fragments in Table 4 were cloned into a plasmid provided from GeneArt using the restriction enzyme I-SceI. Prior to transfection of these synthetic DNA fragments into BGMK cells, the plasmids were digested with I-SceI and the products were run on a gel to confirm that the DNA fragments were successfully linearized. Following digestion at 37° C. for 2 h, the reactions were subsequently heat-inactivated at 65° C. Samples were stored on ice or at 4° C. until the terminal hairpin/duplex/70 bp tandem repeat/ITR fragments were created (as described above).

Reactivation of scVACV ACAM2000-WR DUP/HP or scVACV ACAM2000-ACAM2000 DUP/HP in Shope Fibroma Virus-Infected Cells

[0183] SFV strain Kasza and BSC-40 were originally obtained from the American Type Culture Collection. Buffalo green monkey kidney (BGMK) cells were obtained from G. McFadden (University of Florida). BSC-40 and BGMK cells are propagated at 37° C. in 5% CO₂ in minimal essential medium (MEM) supplemented with L-glutamine, nonessential amino acids, sodium pyruvate, antibiotics and antimycotics, and 5% fetal calf serum (FCS; ThermoFisher Scientific).

[0184] Buffalo green monkey kidney (BGMK) cells were grown in MEM containing 60 mm tissue-culture dishes until they reached approximately 80% confluency. Cells were infected with Shope Fibroma Virus (SFV) in serum-free MEM at a MOI of 0.5 for 1 h at 37° C. The inoculum was replaced with 3 ml of warmed MEM containing 5% FCS and returned to the incubator for an additional hour. Meanwhile, transfection reactions were set up as follows. After approximately 2 h at 37° C., the linearized VACV ACAM2000 fragments were transfected (using Lipofectamine 2000) into the SFV-infected BGMK cells at molar equivalents based on the length of each fragment that comprised the VACV ACAM2000 genome. Different amounts of total DNA were tried and 5, 6, and 7.5 μg of DNA were able to successfully reactivate ACAM2000 from these overlapping DNA fragments. The complexes were incubated at room temperature for 10 minutes and then added dropwise to the BGMK cells previously infected with SFV. Approximately 24 h post infection, the media was replaced with fresh MEM containing 5% FCS. The cells were cultured for an additional 4 days (total of 5 days) at 37° C.

[0185] Virus particles were recovered by scraping the infected cells into the cell culture medium and performing three cycles of freezing and thawing. The crude extract was diluted 10² in serum-free MEM and 4 ml of the inoculum is plated on 9-16 150 mm tissue culture plates of BSC-40 cells to recover reactivated scVACV ACAM2000 YFP-gpt::105. One hour post infection, the inoculum was replaced with MEM containing 5% FCS and 0.9% Noble Agar. Yellow fluorescent plaques were visualized under an inverted microscope and individual plaques were picked for further analysis. scVACV ACAM2000 YFP-gpt::105 plaques were plaque purified three times with yellow fluorescence selection.

[0186] After 4 days, the infected plates containing both SFV and VACV ACAM2000 clones were harvested, followed by three freeze thaw cycles to release virus, and then serially diluted and plated onto BSC-40 cells, which preferentially promote growth of the VACV ACAM2000 viruses compared to the SFV viruses. Three rounds of plaque purification were performed followed by a bulkup of the virus stocks in 10-150 mm tissue culture plates. The virus was subsequently lysed from these cells and separated on a 36% sucrose cushion, followed by further purification on a 24%-40% sucrose density gradient. Genomic DNA was isolated from these purified genomes and next generation Illumina sequencing was performed to confirm the sequence of the synthetic virus genomes.

### Growth Properties Compared to Wild Type ACAM2000 Virus

[0187] In vitro multi-step growth curves of the isolated synthetic chimeric VACV ACAM2000-WR DUP/HP, scVACV ACAM2000-ACAM2000 DUP/HP and the wild type VACV ACAM2000 virus were performed in monkey kidney epithelial (BSC-40) cells. The cells were infected at a multiplicity of infection 0.03, the virus was harvested at the indicated times (3 h, 6 h, 12 h, 21 h, 48 h and 72 h), and the virus was titrated on BSC-40 cells. The data shown on FIG. 16 represent three independent experiments. As shown on FIG. 16, scVACV ACAM2000 and wtVACV ACAM2000-WR DUP/HP viruses grew with indistinguishable growth kinetics over a 72 h period.

[0188] A comparison between the growth curves of scVACV ACAM2000-WR DUP/HP (YFP-gpt marker), scVACV ACAM2000-ACAM2000 DUP/HP (YFP-gpt marker), scVACV ACAM2000-WR DUP/HP (no marker) (YFP-gpt marker replaced with J2R gene sequence), scVACV ACAM2000-ACAM2000 DUP/HP (no marker) (YFP-gpt marker replaced with J2R gene sequence) and wtVACV ACAM2000, shows that there is statistically no difference in the growth properties of these viruses as compared to the wtACAM2000 VACV (FIG. 16).

Confirmation of scVACV ACAM2000-WR DUP/HP YFP-Gpt::105 Genome Sequence by PCR and Restriction Fragment Analysis

[0189] Further analysis of scVACV ACAM2000 YFP-gpt::105 genomes by restriction digestion followed by pulse-field gel electrophoresis (PFGE) was carried out on genomic DNA isolated using sucrose gradient purification (Yao X D, Evans D H. Methods Mol Biol. 2004; 269:51-64). Two independent scVACV ACAM2000-WR DUP/HP clones plus a VACV_WRAJ2R control where the J2R gene sequence has been replaced with a YFP-gpt marker, and a wtVACV ACAM2000 control (VAC_ACAM2000) were purified and then left either undigested, digested with BsaI, HindIII, or Not and PvuI. The isolated genomic DNA from both scVACV ACAM2000-WR DUP/HP and wtVACV ACAM2000 were digested with BsaI and HindIII. Since most of the BsaI sites in the scVACV ACAM2000 genome had been silently mutated, a mostly intact ˜200 kbp fragment was observed following BsaI digestion (FIG. 17, lanes 8 and 9). This is unlike the wtVACV ACAM2000 and wtVACV WR control (VAC_WRAJ2R) genomes, which had been extensively digested when treated with BsaI (FIG. 17, lanes 6 and 7). To confirm that the scVACV ACAM2000-WR DUP/HP genome could still be digested with another enzyme, these genomes were digested with HindIII, which produced numerous bands from the scVACV ACAM2000-WR DUP/HP clones (FIG. 17, lanes 12 and 13). To confirm the presence of the 70 bp tandem repeat elements within the ITR regions, the genomic DNA was digested with Not and PvuI (FIG. 17, lanes 14 to 17).

[0190] In the wtVACV WR control (VAC_WRAJ2R) sample, a band at about 3.6 kbp (marked with asterisks) was detected, which encompasses all of the 70 bp tandem repeats in the WR strain of VAC. Given that the VACV WR strain used as a template to design the synthesis of the ITR repeat elements, it was expected that some bands were detected in the NotI/PvuI treated scVACV ACAM2000-WR DUP/HP clones at close to the same size as what was seen in strain WR. When the two scVACV ACAM2000-WR DUP/HP clones were compared differences in the size of this region were observed, suggesting that not all of the 70 bp repeats were incorporated into each reconstructed genome (FIG. 17, lanes 16 and 17). This is not unexpected, given that others have shown that these repeat elements can expand and contract under selective pressure in cell culture (Paez and Esteban 1988).

[0191] Overall, in vitro analysis of the scVACV-WR DUP/HP ACAM2000 YFP-gpt::105 genome suggested that reactivation of VACV-WR DUP/HP ACAM2000 from chemically synthesized DNA fragments was successful and that scVACV-WR DUP/HP ACAM2000 virus behaved in vitro like the wtVACV ACAM2000 virus.

Confirmation of scVACV ACAM2000 YFP-Gpt::105 Genome Sequence by Whole Genome Sequence Analysis

[0192] Two clones of scVACV ACAM2000-WR DUP/HP and two clones of scVACV ACAM2000-ACAM2000 DUP/HP were sequenced. The Illumina reads were de novo assembled using CLC Genomics Workstation (version 11) with a word size of 35 or 61. Assembled contigs were then imported into Snapgene software and aligned onto a reference sequence of the expected scACAM2000 sequence based on the synthetic fragments that were provided by GeneArt.

[0193] For clone 1 of scVACV ACAM2000-WR DUP/HP, contig 1 was 16,317 bp, and corresponded to most of the ITR region (except for the tandem repeat sequences. Contig 2 was 167,020 bp, and aligned with the central conserved region of the genome (nucleotide positions 19,467 to 186,486). For clone 2 of scVACV ACAM2000-WR DUP/HP, contig 3 was 16,322 bp, and corresponded to most of the ITR region (except for the tandem repeat sequences. Contig 1 was 167,020 bp, and aligned with the central conserved region of the genome (nucleotide positions 19,467 to 186,486). There was a single nucleotide substitution (C to A) at nucleotide position 136791 of the contig of clone 2. This corresponded to nucleotide position 156,256 in the scACAM2000 genome sequence and resulted in an amino acid change from an Asp to Tyr in VAC_ACAM2000_177 (A41L).

[0194] For clone 1 of scVACV ACAM2000-ACAM2000 DUP/HP, contig 1 was 167,020 bp, and aligned with the central conserved region of the genome (nucleotide positions 19,469 to 186,488). Contig 2 was 16,150 bp, and corresponded to most of the ITR region (except for tandem repeat sequences). When this contig was mapped to the reference genome in Snapgene, gaps in the sequence were observed at positions 2633 to 3417 and nucleotide positions 15,175 to 15220. The first gap region corresponds to the 54 bp repeat region and it is most likely due to the inability to accurately assemble these regions using de novo assembly tools. Mapping of the raw Illumina reads directly to the reference genome did not result in any gaps within either region. For clone 2 of scVACV ACAM2000-ACAM2000DUP/HP, contig 1 was 16,075 bp, and corresponded to most of the ITR region (except the tandem repeat sequences). Contig 2 was 167,078 bp and aligned with the central conserved region of the genome (nucleotide positions 19,469 to 186,546). There was a gap observed in contig 2 from nucleotide position 15,176 to 15,220. Mapping of the raw Illumina reads directly to the reference genome did not result in any gaps within this region, however. Neither sequenced clone of scVACV ACAM2000-ACAM2000 DUP/HP displayed any other nucleotide mutations at any position within the genome.

[0195] The Illumina reads were also mapped to a reference map in CLC Genomics. The Illumina reads covered the full length of the reference sequence with an average coverage of 1925 and 2533, for clone 1 and 2 of scVACV ACAM2000-WR DUP/HP, respectively, and an average coverage of 2195 and 1602 for clone 1 and 2 of scVACV ACAM2000-ACAM2000 DUP/HP, respectively.

[0196] Overall, the sequencing data corroborates the in vitro genomic analysis data and confirms that scVACV ACAM20000-WR DUP/HP and scVACV ACAM2000-ACAM2000 DUP/HP were successfully reactivated in SFV-infected cells.

### Removal of YFP Gpt Selection Marker

[0197] Following reactivation of the scVACV ACAM2000 YFP-gpt::105, the yfp/gpt selection marker in the thymidine kinase locus can be removed.

### Example 3. Human Mesenchymal Stem Cells (MSC) Loaded with a Synthetic Chimeric Poxvirus

[0198] Primary human MSCs are isolated from bone marrow of healthy donors, cultured, and characterized as described in Apel A et al. Exp Cell Res 2009; 315:498-507.

[0199] Human MSC are infected with the synthetic chimeric poxvirus, such as scHPXV, scVACV ACAM2000-WR DUP/HP or scVACV ACAM2000-ACAM2000 DUP/HP. Cells are infected in serum-free media 2 hours at 37° C. while in constant rotation to prevent cells from settling. Cells are infected at multiplicity of infection (MOI) of 2 or 4. After incubation, MSC are gently pelleted and supernatant removed. Cells are plated and allowed to incubate at 37° C. for 48 hours. The percent of infected cells is determined by flow cytometry.

[0200] The oncolytic activity of MSCs loaded with the synthetic chimeric poxvirus is determined by using a specific highly or intermediately proliferating cell line or in vivo.

### Example 4. Adipose-Derived Stem Cells (ADSCs) Loaded with a Synthetic Chimeric Poxvirus

[0201] Adipose tissue is an ideal source of mesenchymal stem cells. Human adipose tissues are obtained from healthy donors as fat biopsies in an outpatient clinic. 2 cubic cm of subcutaneous fat is excised prior to incision of the fascia. The fat tissues are minced with surgical scalpels and incubated in 0.075% collagenase type I (Worthington Biochemical, Lakewood, N.J.) for 90 min at 37° C. Digested tissue is centrifuged at 400 g for 5 min with the pellet washed in PBS, passed through a 70 m cell strainer (BD Biosciences, San Jose, Calif.), and incubated in red blood cell lysis buffer (154 mM NH4Cl, 10 mM KHCO3, 0.1 mM EDTA). Cells are grown in T-175 cm2 flasks at a concentration of 1.0-2.5×103 cells/cm2 in Advanced MEM with 5% PLTmax (Mill Creek Life Sciences, Rochester, Minn.), 100 U/ml penicillin, 100 g/ml streptomycin, and 2 mM L-glutamine (Invitrogen, Carlsbad, Calif., USA) in a 37° C. 5% CO2 incubator for 3-4 days. When cells are 60-80% confluent, they are passaged using TrypLE (Trypsin Like Enzyme, Invitrogen).

[0202] Cells are frozen in aliquots in liquid nitrogen and stored until use.

[0203] ADSCs are infected with the synthetic chimeric poxvirus, such as scHPXV, scVACV ACAM2000-WR DUP/HP or scVACV ACAM2000-ACAM2000 DUP/HP. Cells are infected in serum-free media 2 hours at 37° C. while in constant rotation to prevent cells from settling. Cells are infected at multiplicity of infection (MOI) of 2 or 4. After incubation, ADSCs are gently pelleted and supernatant removed. Cells are plated and allowed to incubate at 37° C. for 48 hours. The percent of infected cells is determined by flow cytometry.

[0204] The oncolytic activity of ADSCs loaded with the synthetic chimeric poxvirus is determined by using a specific highly or intermediately proliferating cell line or in vivo.

1. An isolated stem cell or population thereof comprising a synthetic chimeric poxvirus (scPV), wherein the virus is replicated and reactivated from DNA derived from synthetic DNA, the viral genome of said virus differing from a wild type genome of said virus in that it is characterized by one or more modifications.

2. The isolated stem cell or population thereof according to claim 1, wherein the poxvirus is an orthopoxvirus.

3. The isolated stem cell or population thereof according to claim 2, wherein the orthopoxvirus is selected from: camelpox virus (CMLV), cowpox virus (CPXV), ectromelia virus (ECTV), horsepox virus (HPXV), monkeypox virus (MPXV), rabbitpox virus (RPXV), raccoonpox virus, skunkpox virus, Taterapox virus, Uasin Gishu disease virus, vaccinia virus (VACV), variola virus (VARV) or volepox virus (VPV).

4. The isolated stem cell or population thereof according to claim 3, wherein the vaccinia virus strain is selected from: Western Reserve, Clone 3, Tian Tian, Tian Tian clone TP5, Tian Tian clone TP3, NYCBH, NYCBH clone Acambis 2000, Wyeth, Copenhagen, Lister, Lister 107, Lister-LO, Lister GL-ONC1, Lister GL-ONC2, Lister GL-ONC3, Lister GL-ONC4, Lister CTC1, Lister IMG2 (Turbo FP635), HD-W, LC16m18, Lederle, Tashkent clone TKT3, Tashkent clone TKT4, USSR, Evans, Praha, L-IVP, V-VET1 or LIVP 6.1.1, Ikeda, EM-63, Malbran, Duke, 3737, CV-1, Connaught Laboratories, Serro 2, CM-01, NYCBH Dryvax clone DPP13, NYCBH Dryvax clone DPP15, NYCBH Dryvax clone DPP20, NYCBH Dryvax clone DPP17, NYCBH Dryvax clone DPP21, VACV-IOC, Chorioallantois Vaccinia virus Ankara (CVA), Modified vaccinia Ankara (MVA), and MVA-BN.

5. The isolated stem cell or population thereof according to any of claims 1 to 4 that is a non-cancer stem cell.

6. The isolated stem cell or population thereof according to any of claims 1 to 5 that is a human cell.

7. The isolated stem cell or population thereof according to any of claims 1 to 6 that is selected from a mesenchymal stem cell (MSC), a neuronal stem cell, a vascular stem cell, an epidermal stem cell or an induced pluripotent stem cell.

8. The isolated stem cell or population thereof according to any of claims 1 to 7, wherein the MSC is derived from bone marrow, umbilical cord blood, or adipose tissue.

9. The isolated stem cell or population thereof according to any of claims 1 to 8 that is selected from autologous or allogeneic cells.

10. The isolated stem cell or population thereof according to any of claims 1 to 9, wherein the one or more modifications comprise one or more deletions, insertions, substitutions, or a combination thereof.

11. The isolated stem cell or population thereof according to claim 10, wherein the one or more modifications comprise one or more modifications to introduce or delete one or more unique restriction sites.

12. The isolated stem cell or population thereof according to any of claims 1 to 11, wherein the viral genome comprises heterologous terminal hairpin loops.

13. The isolated stem cell or population thereof according to any of claims 1 to 12, wherein the viral genome comprises terminal hairpin loops derived from vaccinia virus (VACV).

14. The isolated stem cell or population thereof according to any of claims 1 to 11, wherein the viral genome of the scPV comprises homologous or heterologous terminal hairpin loops and wherein the tandem repeat regions comprise a different number of repeats than the wtPV.

15. The isolated stem cell or population thereof according to any of claims 1 to 14, wherein the left and right terminal hairpin loops a) comprise the slow form and the fast form of the vaccinia virus terminal hairpin loop, respectively, b) comprise the fast form and the slow form of the vaccinia virus terminal hairpin loop, respectively, c) both comprise the slow form of the vaccinia virus terminal hairpin loop, or d) both comprise the fast form of the vaccinia virus terminal loop.

16. The isolated stem cell or population thereof according to any of claims 1 to 15, wherein the virus is replicated and reactivated from overlapping chemically synthesized DNA fragments that correspond to substantially all of the viral genome of the scPV.

17. The isolated stem cell or population thereof according to any of claims 1 to 15, wherein the virus is reactivated using a leporipox virus-catalyzed recombination and reactivation.

18. A pharmaceutical composition comprising the isolated stem cell or population thereof of any one of claims 1 to 17, and a pharmaceutically acceptable carrier.

19. The pharmaceutical composition according to claim 18, wherein the scPV is inactivated.

20. The pharmaceutical composition according to claim 19, wherein the inactivation is performed by heat, UV or formalin.

21. A method for delivering a scPV to a subject, comprising infecting the stem cells or population thereof of any of claims 1-17 with said scPV and administering the scPV-infected stem cells into the subject.

22. A method of treating or preventing cancer in a subject, comprising administering the stem cells or population thereof of any of claims 1 to 17 or the pharmaceutical composition of any one of claims 18-20 to the subject, to thereby contact the cancer cells of the subject with the scPV.

23. The method of claim 22, wherein the stem cells or population thereof of any of claims 1 to 17 or the pharmaceutical composition of any one of claims 18-20 are administered in a single administration or multiple administrations.

24. The method of claim 22, wherein the stem cells or population thereof of any of claims 1 to 17 or the pharmaceutical composition of any one of claims 18-20 are administered intravenously, intraarterially, intratumorally, endoscopically, intralesionally, intramuscularly, intradermally, intraperitoneally, intravesicularly, intraarticularly, intrapleurally, percutaneously, subcutaneously, orally, parenterally, intranasally, intratracheally, by inhalation, intracranially, intraprostaticaly, intravitreally, ocularly, vaginally, intracoronary, intramyocardially, transendocardially, trans-epicardially, intraspinally, intra-striatumly, transdermally, rectally or sub-epidermally.

25. The method of claim 21 or 22, wherein the virus encodes a therapeutic gene product.

26. The method of claim 25, wherein the therapeutic gene product is an anti-cancer agent or an anti-angiogenic agent.

27. The method of claim 25, wherein the therapeutic gene product is selected from: a cytokine, a chemokine, an immunomodulatory molecule, an antigen, an antibody or fragment thereof, an antisense RNA, a prodrug converting enzyme, an siRNA, an angiogenesis inhibitor, a toxin, an antitumor oligopeptide, a mitosis inhibitor protein, an antimitotic oligopeptide, an anti-cancer polypeptide antibiotic, a transporter protein, or a tissue factor.

28. The method of claim 21 or 22, wherein the scPV contains a gene deletion.

29. The method of claim 28, wherein the deleted gene is selected from a gene encoding a protein or fragment thereof, a gene segment that regulates transcription, a gene segment that regulates viral replication, a gene segment that affects cellular mitosis, a gene segment that affects cellular metabolism, a gene segment that encodes an antisense RNA, a gene segment that encodes an siRNA, a gene segment that regulates angiogenesis, a gene segment that regulates one or more transporter proteins, or a gene segment that regulates one or more tissue factors.

30. The method of claim 28, wherein the gene deletion potentiates the anti-cancer or the anti-angiogenic effect of the virus.

31. A method of treating a variola virus infection, comprising administering to a subject in need thereof the stem cells or population thereof of any of claims 1 to 17 or the pharmaceutical composition of any of claims 18-20.

32. The method of claim 31, wherein the stem cells or population thereof of any of claims 1 to 17 or the pharmaceutical composition of any of claims 18-20 are administered in a single administration or multiple administrations.

33. The method of claim 31, wherein the stem cells or population thereof of any of claims 1 to 17 or the pharmaceutical composition of any one of claims 18-20 are administered intravenously, intraarterially, intratumorally, endoscopically, intralesionally, intramuscularly, intradermally, intraperitoneally, intravesicularly, intraarticularly, intrapleurally, percutaneously, subcutaneously, orally, parenterally, intranasally, intratracheally, by inhalation, intracranially, intraprostaticaly, intravitreally, ocularly, vaginally, intracoronary, intramyocardially, transendocardially, trans-epicardially, intraspinally, intra-striatumly, transdermally, rectally or sub-epidermally.

The application's sequence listing, which the Patent Office published only in electronic form, follows.

SEQUENCE LISTING (120 sequences)

SEQ ID NO: 1 - DNA, 10095 bp, Horsepox virus
tgtgtgaccaacgaccgtaggaaactctagagggtaagaaaaatcaatcgctttatagagaccatcagaaagaggtttaatatttttgtgagaccatcgaaggagaaagagataaaacttttttacgactccatcagaaagaggtttaatatttttcttagtacaaaagttaatgttttaaaatatatggatgagaatatttgtctgtataaaaacttgtgtgaaattttgtaccaaagaaaaaacgtgagcagtatcccctatatggattttactagatcatttatatgccaaaaaatattatactatatacgtttattatatgatgttaacgtgtaaattataaacattattttatgatgcaattgtctagtaacctagatgggcatagggatattgataatctctacgagaatatattgttggacgttatcgtttacgaaatagttgaaacatcagaaagaggtttaatatttttatgagaccattgaagagagaaagagaataaaaatatttttgtaaaactttttttatgagaccatcgaagagagaataggaataggaatagtgatcatatcgtatcacatattgagacagaaaaagaagaagtaacgagatgtaactttttgtgaatgtagttaagaacatttttgttttgcaaaccggaatatagtgtccggtacacttttttaattcgtggtgtgcctgaatcgttcgattaaccctacttatccaatttcagatgaatagagttatcaattcagacacacgctttgagttttgttgaatcgatgagtgaagtattatcggttgcacctttagatgccgatccgtcgacatacttaaatccatccttgacctcaagttcagatgattccttgcacatgtctccgatacgaacactaaactctagatttttgacgcattttgtatcgacgatcgttgaaccgatgatatcttcgtaactcactttcttatgagagatgttagacccgagtactggatgggtcttgatgtcgctgtctttctctttttcgctacatctgatgttgatagacacctcacagtctttgatcatagccagagcttcttcacgagtgatcgcgggagagtccttaccttgtcctggggacacactggacaatctagcattcaccgtgtttccgtcagaggattcagagatggataaaatctttgggcattttgtgaatccaaagttcatgttaagacccgcaccaacgatactgtaataagtggtgggatctctttttacaacttcttcggatacctcatcgtctttggtctctgtaacttccgttacggattgacaaatcttatcatcggtcggtgtttggtcttgctttgtgactttgataataacatcaattcccatatgatgtttgttttcttcttccgtacacgaggatgaggatgaaaatgattgaagactggcaggcatagcagctgccgccaggcacatgcatgccaggacgatatattgtttcataattgctattgattgagtactgttctttatgattctacttccttaccgtgcaataaattagaatatattttctacttttacgagaaattaattattgtatttattatttatgggtgaaaaacttactataaaaagtgggtgggtttggaattagtgatcagtttatgtatattgcaactaccgggcatatggctatcgacatcgagaacattacccacatgataagagattgtatcagtttcgtagtcttgagtattggtattactatatagtatatagatgtcgacgctagatagacagtcgcccactagagttacagtctccaaatgcggcatgataccgtcatcattctttgctttcgttaactgtttggaggaaaaatttttgttattgcatttaatctcgaaattcagagtgcacacctttgaaatattttgatatctattttctcctgtaaagaaacctgaagttgctaccttattaaggacagagaagtattcctcacgaaatacgggattacagtctttatgattcatagtaatagttagttccgacgttgagatggattcgctgagaccggtagtggtcgtccgagtacacgatgtgtcgttaactggatacaggttaatttccacatcgatatagttaaacgtatttctgggtacgggttcgcatttatctgcggaagagacggtgtgagaatatgttccgagaccacacggaaaacagatgacgtctccggtagacgtgtgtccggatactccgtatcctattccacattttgtttgggaaacacatgccttgcatccggatgatcctttgagaagacaataatatccgggagagcattcacagattctattgtgagtagtgttacacgatcgcgtctctacctgattactatcgcatcttccgttacaacttagacaagcgggtaaatgattattgcgagatgtgaaggtacccgaaccacacggcgtacattgtgtgttagtcttgctatcgcataatctggaagcgtatgttcccggaggacacgataaacaacacaaattatggcgtttgtattcgttgtctttacactttccattggatggtgcatgcggtgctatatctcttccgtttattattatacatgagagaaacaatatatacaagtataatacggacttcataatttaataatgtagtaatcgttgtcttgttcttgtttcctacttctccaattatatagatattttttaaatattttctttctatcatggataatatttgtaatggttctttccgtacaacatactgtttagatgatagtcgcttagcttggttatgatattgcgcataatttccggaggcaaatacgatagtctagattggccatcgatggtagactctaatttattgagtgctttgtcgacgagtttacttttacgctccatcgatagatggcactgttctatgagatcgtcgtacatgggaaatgaaatgtgactgtctgaatgtatggctttaagatagctgtgataccgtatgtcttctgttcttaataccgtatacaggtcggtgtcggagattcgaatctctttaaggcgacttatgtcacgactgcatttttcgatgatggaatctatcttatcgaatgatatatttttcataaatacacttttatagtcctcgtttaaacagaatttactatgtagttccgcgaatgactcgtcccttaataggcagtaggctagtatcttttttacgtagtaatcgtcgtagggagagaattctgacatcttgtaaaacaacgatttaatcataggtagagatactttcagtctgtggtggatgatgtcattcacaacatccgccttgtatatgatgtttctgttttcaaacaccaagtcgaataccgtcttatcgtctttagtcggaaggttgatgtcgtatccgatgtatacgaggtatgaggcaacattgttgttacaattttgaaaggcggtatgaagaggagtcatggtattatagtattcgtctttctgaatgtcgaacctatttagtagataccgtagtatattgagagtgtaacttccgtatccttgattatgttttatgaatagataaagtagatgttgtccttcttccttttgtaatttcccgtatttttgttcgtgccaattgagtaacattatgagaatatgacctgttgcacaatcgttctttatgtattccatgatgggtgtacaatcaagattattacgtatcctcgtatcggctcctcgagataaaagagcatacaccacacgaggactatgtttggtatactgttgaaggtaagtgtgtaacggcgtatttccgatttttgtaaccgcgttaatgtttgctccataatctattatcgcgtagatgaatcgcttctcggctcgcatcttagtgtgacttgacttgtaataattgcttttgtagaacgtggatatgtgtttacagtagtaatgaagagaagtgagttcatcctcgtcggcgcaattagggtcggatcctttagtcaataatttgtacagaacgtaatagtttaagctcccattgaatttatatctaagataacacagcaatagatcggatgatttactaaagtcatcaatggtgtccgttagtatatcaaagatcttgttatcgattgatagtgaatgaatcagatagtggtgtagaggaatatgtcctttttcatccttgctatcaaagttacgcatgccgtggtgtaacaatatctttaatacagatggattaaatcgtgtattcatcgtatagcaatgtaatggagagttaccacattttagtcgtttattcagatcgcagtgtttaataactagcttaaacagatgagacgatgtatccacatcaaagaacgtaaaatacatatgacaaacattgttgacagaaacgtgaccttcattcttaccgtcgtccataaatacgttaggtatgtaccacatactgtcgcgaacgatgcgtacaatctcgtccatttcatccatctcataatgatttactttttcataattaaagatgtgaaagaaaaagaaaaccgaacaatatattttttagtaatgtttatgcgagacatataaaataaactccgtgtttatgatgccggtaaatgtttttatcatcttggacggaatcgattttgtaatatgtcatggaaacaaatgaaacaggacattatcgctccatgataaattatttaatggagtaataaagtatctcgagttgtatctccatgggtaatttcgaaatcaagttatcgtctgtattaatgttgtccactatggagtcgatcctctcattgttctttacagtttctgtaatgatggacgttagttcttttttgtaccatttgatgttggatacaaagtttataaatgtcggattctttgcgtatctcaatctgtggcgtttgcttcgtttaaataatatatcaaacatggagacgcctgatatgtaggcattcttcattctattaatgtctactctatagcgctttagttccttatgatgaccggcgatatcatacttactttagaaggaaaatcatcatctatgattaaggcgtatctgatacatgccgataatggttcaggatatagatagcgtatatctctattaaatgcgtcaatcatagtctctagagtgggatggtagctaagtaataaatcaactatcctcgttttgttttctctttggtaactgcttttctggatggccgtattgattatcgagcgtgatgttgtaacactcgctccatattccaataaccgctttgcaaattgtatattattgacatcgaccgcgtaatatagtagagttttattctcattatcgatcatatctatattatccatgtacttgcttagtatatcaaatacatctattagtatggtttcataacagtgatacccgcaattattaaatctcgataatatcagaccgtacatacatagacggccattgttagatatgtgatttacagccgcgtgtccatattttccacgataaaccttacgacgtttacatcgacgagattattattaacaaagtagtcgtgagaggatagttgttgtccgttgtcttatccatggtcgctccgttatctaacatgcatcgaacgataggtatacttaccatatcgccgtaatgtaagtagtttatcaacatggcttgtacgatggattcatcctgttgtctaaatctctttagaatgttatcaatgatgtagtggttatattctctggaatcgtacgaagtaatactacgcattacgtcgacaagagtatgacgtctctcaataagaagattaacgatttccatgtctacattatatggggttactctaaatcgcttgtttagataatccgctaatacgcctctaatatagggctgactgacgtcgtcgtatactctacacgtgtccacatcctttattaataataatttaacaatctctatatctatggttgagaaagaccagtagtattggatgggtaaagatcctccttcgtctctgccatggatggaaacattgttattgatcaaacatttaattacatccttggatagagattgagattgagattctctatgagacgatatatagtaatgaagagagttcttacacatatcactgttgtacatacaggtacgaaatacgtaaccggtgctgtaacattctgatttaagaagccatagcaatacttctggtctcggattaggcgtcgttacgtatatatccaccaatccgagactattgtttgcataattcgtattcttggacggacgtatccgtttatccacaattaggtattttagcagacgtaagtcgatattatccgaagacatatacgaatacagatcgaaatcatttatattcgacttgagtttgttagaggaattcgaatagctggatatcagtagatgcacaatttgagatttgacgtatctatgcttactgtatactcctagcggagttaatccttcgttgtttctacaaagtctctcgactccgcgagagagtaacagccgaacaatcttaatgtctgtatcgcatttattgaagacgtaacaatgtagcgcattgtttcctcgtctatctatatgttttgataagttgtgacacgtttcaatttctagttttattttttcgtacgtcacatcttcatccagtagacgacatagaatacatgtgcaatctctgacgcaatccatagctattctggtgctaattattcctatattatatttcacgaaaaatgatgaaggcaatcattcctcataagatgataaaaagtaaggtgggtgtgataaaaagtgtagtgagtgagtgagtgagaaagtaagagtattagtgagagagcatgaaggagatttagtatttagcagtgcggatatgatccaagagggtgagatagtcgttttcgttcagaatctttcgcagcataagtagtatgtcgatatacttatcgttgaagactcttccagagacgatagctgattgagtacaaagtccaatgattgcacgaagttcttcggcggttttcatggagtcatttctgatgaaacatttaatgatctccacgcaattgtcgatattgtcccacggaagtgaatccgagaactccttcaactcaccaccaaagagctccgttgcatcagttctgaaagagatgagaagcctgtagagagaccctgcgctttctctatgggtccatctatgagaaacccacaggatgtattcagtcagacaatgtctgacgtcggccacggtatacagggagtccttagtagcgtggcaatgacagggtctgaactgggcacaaggaaaggccattgtaaaggtagacgaaggttaacctgatggtagacctgtagccgtctatgctaatagagggctttaatttccatttttttaatgggttgtggatgaggaatgagagtgtcttatttcgtccttggtttacatggatcagagtgagaaaaaaatatcttgtatattattaactaacaaccttggtttccaaatagcttaagaaggcatttacacataatggagatatattccagcagaaaactggataaccgtccaaagtattatttgatatagtagtttttgatataatagacgcgaccccaatagcagtttttgtaaattgaacagggtctatactatgagtaacgtctgatttctgtttaagtttcgtatacaagtcaatgttatagacataatccatatcagagttagagtcataaatatcttttagtacagtaacgcgcatatcatgtataaatggttccccatacgtttcaattgctaagtcctcataagtcgtaaactctttgaatattggtcccatatcatcaatgtttagattatgtacaattctcaaatacgctttgacaagattataaaaccctcttacttgagttttagctacgataactgaaaatggcatatatttgataaactcctaaaagaataattttgtcagggctccatctctcatcaagttacatgtatttgtaataacgtcatttacagtactatttttttgtaaatctaaatttttaatgattctattaacttcttgattattcatggccttaatagcattggatattttatcatccatgtttaaaaaataacctatatgttaatacttgatattgatattaataattagtataattactatgtattatatttcattattatgaggaggatttatgtcatatcatgaaattaataagagaactagattaaagtaatagtaataggaataggaataggaattacttttcgtttgtctcactattataaaaagatgttatatctcaatcactgctataaagatccatcatatactatgatactgtatcagtttctatcaatctctgttttgggtgaattcaaaaaaaattaataatacctagaaaatattccatgagcatttcttttatcgatatagcatttggatagcctgtcaatatcgacatcattgaacaacggattcatcttacacttttcacgaacatcctgagatacattgttccatcttataacccgaattagatcattgtcttcagggaacttagttagccaatcaagaataatatcaatgacctcatcttctttgacatctagatagtcgcagtttatgatattaaacatagaatctgctgatatcaattgtttgaatctaacatccttatacaatgtttcaatctcattagcaatgttttcctcaatcatagtcatgacattgtatttatcctccatttccttatatctattgctaaacaactcatacatctcaagagcgtttctttcatctatcatataatgaaagatacgaactgttgcatggcccaagatctcagaatcaaggaagcgagcaagatcaaacatttcaactacatcttccaactcaagattatccatgactcctgtgtatatgaaatcaatggccatctcgataacaaaacctgaataatcaatattgaagattttttgatctggatcattacttagcatctcagcaaagtatgtagaaaatccagatacagccaccttatgtgcgataatgtcgttgttatcttttgtgtggaatgttatatcacaaaactttccagattttctaagattattcatattgctagctagatcatatctatgtttcacacacaattctttctcatgttcgttaaggtcgtacccacgaacaaaatagtaatcactcattctgacgacagcataaacagtaactaatttttctatctttagagagtatctccctattacctcattatgataatgtgtaaatagatacttcttaataatgtatagatgctgtctataaaaaaatcattcatgggtttgtgtttggacgcttttcatagactgtagtaagtggtcaatattacatcctatgtaatcaatagcagggttagttgcataatatttcatatacaagtcacgcacgatagctatctatctaattaattgttctagtcgcacacatatttggaggtatatagctaatatcgattatgtttcctatatgaatagtagcagtatcctcttcaaatccctcattggtattgacatacgcgatagagatggagatctgatagacagttgcctattaaagtgaaattttcagcgtgtgttgatgctttttcaggaacgcgtgtaaaattaccgattaatacaggttccgtttcagcgttacattttacttttatattcagcgtacacatcttggatgtattttgtttttttgtagtatctgtaaaaagtcctgctatagcagttttaccctttacagagtaatattctgttacaaagactggattgcaatctgttctattaacagtaattgtcaatttagaagtcgtgataacatctgatgattgttttgtacttagtcgattacaagatgatacgttaactggatatagttcaaaatctagagaaatgtagttaaatgtagttaaatgtatctgtaatgtatttgtcttcaaagaaaccgggtgtaggataatcattt

SEQ ID NO: 2 - DNA, 16257 bp, Horsepox virus
attaataatacctagaaaatattccatgagcatttcttttatcgatatagcatttggatagcctgtcaatatcgacatcattgaacaacggattcatcttacacttttcacgaacatcctgagatacattgttccatcttataacccgaattagatcattgtcttcagggaacttagttagccaatcaagaataatatcaatgacctcatcttctttgacatctagatagtcgcagtttatgatattaaacatagaatctgctgatatcaattgtttgaatctaacatccttatacaatgtttcaatctcattagcaatgttttcctcaatcatagtcatgacattgtatttatcctccatttccttatatctattgctaaacaactcatacatctcaagagcgtttctttcatctatcatataatgaaagatacgaactgttgcatggcccaagatctcagaatcaaggaagcgagcaagatcaaacatttcaactacatcttccaactcaagattatccatgactcctgtgtatatgaaatcaatggccatctcgataacaaaacctgaataatcaatattgaagattttttgatctggatcattacttagcatctcagcaaagtatgtagaaaatccagatacagccaccttatgtgcgataatgtcgttgttatcttttgtgtggaatgttatatcacaaaactttccagattttctaagattattcatattgctagctagatcatatctatgtttcacacacaattctttctcatgttcgttaaggtcgtacccacgaacaaaatagtaatcactcattctgacgacagcataaacagtaactaatttttctatctttagagagtatctccctattacctcattatgataatgtgtaaatagatacttcttaataatgtatagatgctgtctataaaaaaatcattcatgggtttgtgtttggacgcttttcatagactgtagtaagtggtcaatattacatcctatgtaatcaatagcagggttagttgcataatatttcatatacaagtcacgcacgatagctatctatctaattaattgttctagtcgcacacatatttggaggtatatagctaatatcgattatgtttcctatatgaatagtagcagtatcctcttcaaatccctcattggtattgacatacgcgatagagatggagatctgatagacagttgcctattaaagtgaaattttcagcgtgtgttgatgctttttcaggaacgcgtgtaaaattaccgattaatacaggttccgtttcagcgttacattttacttttatattcagcgtacacatcttggatgtattttgtttttttgtagtatctgtaaaaagtcctgctatagcagttttaccctttacagagtaatattctgttacaaagactggattgcaatctgttctattaacagtaattgtcaatttagaagtcgtgataacatctgatgattgttttgtacttagtcgattacaagatgatacgttaactggatatagttcaaaatctagagaaatgtagttaaatgtagttaaatgtatctgtaatgtatttgtcttcaaagaaaccgggtgtaggataatcatttgcaaacgatgtaacaaataataatgcgaatattagtattgtgtttatgtttatgtttatcatgatgagtatttatgataacaaagttttgtattatccggagtggtacagcattggtcggttggttctattttctttattgtggtatcaggagtacatctggcacaactattgactgcaggtaccgtacattttaatcctggaccacattgacattttcgtggtttattaggtccacatggttgtatctctaccatattgcttaaacaagtaacacacgccgtacataaaccatcttcaggttcaagatagtaatcattaggacacgttttaccaaatgatgtatatactaggcaggttacgatagcggataaaaagatagtattcatcttcatgctatttaatacatctaatatatgtattagttattaaaaaaatattattttatagaaactttgtgtgtgtatccagaacaattttatcttagtcactctttatctgtaagtcgagcattgataaatgtggcatgttgtctgttaattattatttttttaaaatacgttagtctaaatatcccgataatgcaactaaataaaagagtaacgggaatacgcataacgggatacatatccatgatatattttaatatgtcattggctatataatacatatatcgcgcatctgttatgtacgtattaattatatcatataatggatcattaccatgacaacacgctactagattgtgattttccctatatgcgattatgtcctctttgtaacatttaccaactagtatatcgtatatgctaatattagttctcgaattaatgtgtaactttgtcaacttatcgatgttatttctaatgctaactaacttatcaaatgccaaaaacattgcatgactattatcgagaatcgctatatccctctccatatactcgatgcatttattacagtaatccaatccagctaacataagagccaatctcaatgttggtttaatgatatcatgttcacataataataacgatggaaactttccactagtgtaacacttatctaagaatgatataaccatgtttacattaggtctcttatcgagaatattcttaacaagataccattggtggcccgacaacatattattttccatggttaacattagaggatctacaccattttttgttggtgtattaatattggcttgaatggataataagtaccacaaatgaatccatgacaatattggcattagtatgtgagataatagatacatgtaatggtgtcataccagatgttttacatactgcgttattatatctttctataatagcacaatgatatacgtcatgtatatttgtactatcgtacggctcatattcatcagtatataagttagtaggtatattatatttagcaacaatatgatgaataatgcatggagtgtcggctactctaattaatagatcctgaagtatgcgattttttaccatattcaatactttattagatatcaggcaatctattatgtcataatacatataattttgagcagtgcatatatatgaagttaatggagtataccctaaacaattgacggctgttatatcagcacccaaggatagcagacactgaataacatctcttatatcgttatcggtttttggatctaatatatgaacaacagacaacatagagagatatgtgtgtagtaccatattaccaatattgtcgggttcatttatatcattcccgtactcgtgtaaaagtttaatgatgctagtacttatgttgtgtcgcagaatatattgatgaagacaagtccttccagcactatctttataatgtagttttattcctggttgtaaaaaggagtaaacgactgatatatcgatattccgagctagtgttatatacgagtggagcatcataggtatattttttactttattgccatctagtgattctatatacaagtttgttatttttggattaatattatctatattggctatgtatatcataatcggactcattccattaacgcatttcatatccatatctccccaagttcgataatctttttaattacgtgtacacaaacatttcctgttatcatgtacgtgtgcaacggagtgataagatcacgattctgtaaatttacatttactccgttattgcataaccactctaatatatctatatcaacatccatgttgccgagatacgcgtgtaggataccgtatcctgttttcttgcatacataattaagatttacaattcctacatctaccatatatttagtcaagtctagttttatatggcgagttctcggtgaattgaaatacgtatatagaatatccatatctccattgttgggaatattaaacacatgattggtggttttacttttattatctttaataatacatttgacgaattttttatactgatcaaccaacgatttgttttttctatccgcttttagcattaaagtcatactaccgatgatattaatcaatgcggttttactatctgtatactgttcacgttgtctattatcaatacaataatatttctttttaaaaacttttatgcgtttagctctaactatgtgattataactgtatatatccccatcgctacagtatccatcatctggatcatcattatttatacgagcattagtgcttatacggttatcaaaatcttcaaagtatgtcgaatatatcagttttctgacattaactatagcgtgttcggttaatgatgctattttgataactataatcaaaaactgtcagtgtgttggtagtgcataaaaagtttatattattgttacattttttaaaaagatcaaggtataaaaattagaagtgttagattatattaattatactataaaaattagaagtgttagactattaactaacttataaaactatcttataaaactatcttataactattaactaacttataaaactatcttataactattaactcatttcaagaagggtgggtggagaaaactctatatgatagcttgtgaaacaattagatccctaatttctaatggaagttttgataggagattgtcatcagttgatacattgtttattatctcatctattagagcacgtctgtttagagctttagtgacatgctcgtttacttctgtgtaaatcttgaatcctttagtgatacactgtgtcaaaactggatgtttagaatacctatgtagaatatgggaagcatgcttgtttttgtccttattatagattaactcatacatggttgtattatgaattttcatctgcctaatgtactccaattcttgtttacaatcaattatataatcaaagagtgatgatgcatacacattacaaagtgaataatctaccatcataaaatacttgatacagagctttattacatcatggttttcaattgtattattaagtatagataattttatacagtcaatagacaatggttctctaagcaatatttctaatattttaagatgtgcttccctactggcgataacagatcccctatccacagccacgtcaagacatgtatatccatcactcattactgcgttgacatttgctccattttctaatagccatgatactaaatctatataacctgcatagatagcgcgataaagcaaggtccttccaccagcatctagttgattaatatcttcaatatatgggatacaaagcttacaaatttctaatactgtgggttcatctacaaggaatcccctagtatactgaattattttatataaatctaacttaacatcattttcatctgggataccacaatttaaaataaactcaacaacactactttcctttttacacattcccctaaaataggcattcaagcattctattttatatattacagccccatgatctaccataaaattaacaatgtctatttttacatatgcattagatagatagtaaagtaagagatcttgcacagaattacaattcttaataattataaagataatatcttccatataattctttgacactaatgcagatataatatctttatatgtaatatatgtaaacagtctatctactatatactgatcaatattatctctatgaatcctaaaataatcatacagaacatctacaggatcacaaattggttcaaggagaaatctatcaaatattttcctgtcaacaactggttctagaacataacagtcaacacccaatccatgttttacatagtcatctaccaaagataatgaccaaatgttgaggtcgtcgtgaaactgctcatcaacagccatgaaatctgccgactccatggtgcgaatcgcactgtcttattcgccattgattttcattttttataattatgtacatgatttccttctattctcaagagtctacaaaatatatattttttcgatatctaagtactaagttttttactgtttttgttactgtcccattcttctaactaaagatctgagataaattatacaatcttcgctatcaaaccatttttgtagtttaaagcctgaagtaattagccaactgtttttattagcggcttttttcgatctatcaatttcagtatattcttcgctgttataaaagtaatgttgtttaattgtaggacggttgttagtataatcacatgaataataatattctaattcctcgtattaactacttacagatactcgaaatagtctgaaaaattcttcaaagatatttttataaagatctaggaaaagtttattaccaaccatgaacgcgataaatggataaatatcctttccatcaaaggtcataattggataattgtccagcaatatatctgctgtattagttatatcacttccatttattttcagattgaagtaatgtactagtttgtgacaattaacaagagacaaaagagatgccgatactaatacgtaaatagctatacgcgaatccattgttacttttttatttcatacgtctattaataaatatatgtattacttaagactagaaaaatcaaaagtgagtttttgatatttgattcttacttattgtgggattgtagtttactaagtaattcatctctgaatcctgataaatcatgcatatcattgatacaactacgcagtaaactagtaggaatacaaatatctggatatgtacgtaaatagtcgattatatcttttacaatactattagtccctattgcgttatctatatatccattaataatattacacagtggatacttatcagaagtatacctcttacagatttctatacataaagtaatatcattattgtatgttttgcttattagtatcatatataaatatagtagaatagttgttaatatatgtagacattaataaactaatattatctcgaatatccactatcacgtctaaagtttgactcagtgatctataattagatgtattttgtgtttccaaatcatgttttatatgctcgataaatttgttacaattatttactcctatcaacataaatgcagaggccatcatttcatacaggctagtatttttagtactacataacgaaaataatgattcgtttttatagcatttatctaaaaatattataatattatctatagaaggtctgttatctagtaacatcttaactatatgacacttattatatcgatctctatgaaatattaacatcaatgcagaaataccctttatagttggtttatcgatactatatccaatagataataaatatttcattgcatctttgagtagacaaacggtggctacgtgaaacgcagtcattccagaaaatggtactatattcttatagtactttatcatttgacaatgatatgcatcattagtttcgtaatcacacttttcatattcatcggtgtatgagtctacaggaatattatatttagtaataacatgatgaattattggcagcgatatatcttctctagttattagatcttggattatacaatgctttaccatgtttaatactttatcagacatcagacaatctattatgtcgtgatacatataattttgtgcggtacatatgtaggacgttaatggggtataacctaaattattaaccaacgatatatctgatcctgaacgtataagatatttaacaacttttatgtttatattgttattgatactcgaatcatatgtcaaattttattaacgatacataaatctagaaagatatgtgtgtagtactgtattacctaaattatcagtctcgtttaaatagttgccgtgttcgagtaaaagtttaacgacatcgatatttatataatttcgtaacatatagctgtgaagacaagtttttccaacactatctttgtaatcaaggattgcactattattcagaaaatgttttatgacatctagatcaacatattgagccatttgtatatacagatacaatatctctggtatattagttatcttgttatcgtccatgtaaatctttataatttcttcgtctatattcatcgcattatatattatataagttattataggagttaactttatacaacatctgagattcctatcagcacctagttcaataactttctttaacacgcttgctgaaattaattcgtctctccgtaaatatgaatgtaatggagtaattagattattgttttgttcatttatattctttccacttttacataataattttagtacatctgtgtctacatacatattaccgagatatgtatgcaatataccaaatccatattcgtttttataattaatatctacgcctttagcaatcatccatttaaccaattttatgttgatgcctatcgtgttatgtgctttgaaatatacagagaatatgttactactatatttgtcactgttttcataatgactatctcgtcctcatcatcactatcatcactatcatcatccttcgttcttattatcatctttatcatcatccttattgtccttatcatcgtctattaaacacaaattatctacgtttataacaacattctcatcattaattagttctgtagtaatatctttaataatttggctatatatctgttcaatactatctattgatgatttctttttatgacttgaactaatgtaatgacgatgaaattgagtagtagcttttaataaagacttgatatcattatcatatgtttgatcgtcgtaattaatagtgtggctaatggtactgttaataagtttatagacaatatcatagtattttctttccagaactagattattttttaatactgatctaacatatatgtcgtaactatcatactggttctcacaattccgtgatgtagcagtagttgatgcatggtctatatcgttaaaatgtatcgtatataatagttttctgacgtggagtacagaattttcgattaatgagttcatggtaaggaagggcgaatgaatgcctgtatatatgcataagttaatagttttttatcatatttttctaatactatataaaaatatcattatgtataatcatcactgtcgctatcattattgtgtttgtgtagttctgtcctatcatctacatcactgctactgtcactctcgctatatcttctaaaattacaaacaactggatattcgataacagcatttgagtagtttttgtcttttacagtatatacgttattgtcaaaatctaaacaaatattagcataatacctatctataagatcaagatccatgttcgagcatactagtgcatatttgtaacttcgtcgtacagcgttagatcaataaataaacaatcttataacgcaactttttacgatctagttgtatgagtttatcgtttacataagctattaacggctttaacagatgatctgagtaatatacctctgttatacatttaatgttcacggtcttagtatttttagatatcaattgtaatttacacccatatttaactcccttgtgtaacgttagacattctaaatctatagtattatctattacagcgtaaaacacatacatttttaacagcaacacattcaatattgtattgttatttttatattatttacacaattaacaatatattattagtttatattactgaattaataatataaaattcccaatcttgtcataaacacacactgagaaacagcataaacacaaaatccattaaaaatgttgataaattatctgatgttgttgttcgctgctatgataatcagatcattcgccgatagtggtaacgctatcgaaacgacattgccagaaattacaaacgctacaacagatattccagctatcagattatgcggtccagagggagatggatattgtttacacggtgactgtatccacgctagagatattgacggtatgtattgtagatgctctcatggttatacaggcattagatgtcagcatgtagtattagtagactatcaacgttcagaaaacccaaacactacaacgtcatatatcccatctcccggtattatgcttgtattagtaggcattattattattacgtgttgtctattatctgtttataggttcactcgacgaactaaactacctatacaagatatggttgtgccataatttttataaatttttttatgagtatttttacaaaaatgtataaagtgtatgtcttatgtatatttataaaaatgctaaatatgcgatgtatctatgttatttgtatttatctaaacaatacctctagctctagatattatacaaaaattttttatttcggcatattaaagtaaaatctagttaccttgaaaatgaatacagtgggtggttccgtatcaccagtaagaacataatagtcgaatacagtatccgattgagattttgcatacaatactagtctagaaagaaatttgtaatcattttctgtgacggaagtccatatatctgtatcatcgtctagtttatcagtgtcccatgctatatttctgttatcatcattagttaatgaaaataactctcgtgcttcagaaaagtcaaatattgtatccatacatacatctccaaaactatcgcttatacgtttatctttaacgatacctatacctagatggttatttactaacagacattttccagatctattgactataactcctatagtttccacatcaaccaagtaatgatcatctattgttatataacaataacataactcttttccgtttttatcagtatgtatatctatatcaacgtcgtcgttgtagtgaatagtagttattgatctattatatgaaacggatatgtctagaacagcaattgtcttacgtccagttaacactttctttgatttaaagtctagagtctttgcaaacataatatccttatccgactttatatttcctgtagggtggtataattttattttgcctccatatatcggtgtttccaaatatattactagacaatattccatatagttattagttaagggtacccaattagaacacgtacgcttattatcatcatttggatcgtatttcataaaagttattgtgttatcgatgttaacacattctacattttttaattgtctatatagtatttttttgatattttctataatatcagaattgtcttccatcgaaagttgtatactatcagaatcagttacatgtttaaataattctctgctgtcattccttatacaatcaaattcattattaaacagtttaatagtctgtaaacctttatcgtcgtaaatatccattgtcttattagttacgcttatttttatgtgtttttacgttgctttattatattttataagaatgattgtttgacgaatcacgagaactattaagacatatattattagaggtatatattataaaaaagtttttgattacgttgttataagaggagaggacacattaacatcatacatcaattaactacattcttataacatcgtaatcaaaagaattgcaattttaatgtataacaactgtcaatgggttatggaattgtatattacatattatacggtatgttggtaacgacaaataccgatcggtaatcgtttgccggtgtaataaaattatatatatctatctattacaccggctgagtatgcataataataagttgtgggtagtatcatccacatatttataatttaggactttgtattcagtatttttggaatcataaaaaaataaaaaagttttaccattttaaaatttaaaaagtatttacattttttcactgtttagttgcggatatggaatttgatcctaccaaaatcaatatatcatctatagatcatgtaacaatattacaatacatagatgaaccaaatgatataagactaacagtatgcattatccaaaatattaataacattaaatattatatcaatatcacaaaaataaatccacatttggctaatcaatttcgggcttggaaaaaacgtatcgccggaagggactatataactaacttatctaaagatacaggaatacaacaatcaaaacttactgaaactatacgtaactgtcaaaaaatagaaacatatatggtctatatatacactacaatttagttattaatgtggttattgattggataaccgatgtgattatcaatcaatattaagagggttggtaaattggtacatagctaataatacctatactccaaatacacccaataatacaacaaccatttctgagttggatatcatcaaaatactaaataaatacgaggacgtgtatagagtaagtaaagaaaaagaatgtgaaatttgctatgaagttgtttactcaaaacgattagaaaacgatagatactttggtttattggattcgtgtactcatatattttgcataacatgcatcaatatatggcataaaacacgaagagaaaccggtgcgtcggataattgtcctatatgtcgtacccgttttagaaacataacaatgagcaagttctataagctagttaactaataaataaaaagtttaatttgttgacgacgtatgtcgttattttttctcgtataaaagattaatttgattctaatataatctttagtattggataaatatcaattcaaattaattccattagattatatcataaataaaaatagtagcacgcactacttcagccaaatattcttttttgaaacgccatctatcgtagtgaggacacaagtgaacctataatgagcaaatttattagtatcggttacatgaaggactttacgtagagtggtgattccactatctgtggtacgaacggtttcatcttctttgatgccatcacccagatgttctataaacttggtatcctcgtccgatttcatatcctttgccaaccaatacatatagctaaactcaggcatatgttccacacatcctgaacaatgaaattctccagaagatgttacaatgtctagatttggacatttggtttcaaccgcgttaacatatgagtgaacacacccatacatgaaagcgatgagaaataggattctcatcttgccaaaatatcactagaaaaaatttatttatcaattttaaaggtataaaaaatacttattgttgctcgaatattttgtatttgatggtatacggaagattagaaatgtaggtattatcatcaactgattctatggttttatgtattctatcatgtttcactattgcgttggaaataatatcatatgcttccacatatattttattttgttttaactcataatactcacgtaattctggattattggcatatctatgaataattttagctccatgatcagtaaatattaatgagaacatagtattaccacctaccattatttttttcatctcattcaattcttaattgcaaagatctatataatcattatagcgttgacttatggactctggaatcttagacaatgtacagtcatctataatcatggcatatttaatacattgttttatagcatagtagttatctacgatgttagatatttctctcaataaatcaatcacataatctaatgtaggtttatgacataatagcattttcagcagttcaatgtttttagattcgttgatggcaatggctatacatgtatatccgttatttgatctaatgttaacatctgaaccggattctagcagtaaagatactagagattgtttattatatctaacagccttgtgaagaagtgtttctcctcgtttgtcaatcatgttaatgtctttaagataaggtaggcaaatgtttatagtactaagaattgggcaagcataagacatgtcacaaagaccctttttgtatgtataagtgtaaaaattataacattcatagttggatttacataggtgtccaatcgggatctctccatcatcgagataattgatggcatctcccttccttttttagtagatatttcatcgtgtaagaatcaatattaatatttctaaagtatccgtgtatagcctctttatttaccacagttccatattccaacatgcattccactagagggatatcgatatcgccgaatgtcatatactcaattagtatatgttggaggacatccgagttcattgttttcaatatcaaaaagatggtttccttatcatttctccatagtggtacaatactacacattatttcgtgcggctttccattttccaaaaacaatttgaccaaatctaaatctacatctttattgtatctataatcactatttagataatcagccataattactcgagtgcaacatgttagatcgtctatatatgaataagcagtgttatctattcctttcattaacaatttaacgatgtctatatctatatgagatgacttaatataatattgaagagctgtacaatagtttttatctatagaagacggcttgattccgtgattaattagacatttaacaacttccggacgcacatatgctctcgtatccgactttgaatacagatgagagatgatatacagatgcaatacggtaccgcaatttcgtagttgataatcatcatacgcgtatcagtactcgtcatcctcgtcctcataaagaacactgcagccattttctatgaacaaatcaataattttaggaacaggatcattgtcattacataattttctataactgaacgatggttttcacatttaacactcaagtcaaatccatgttctaccaacacctttatcaagtcaacgtctacatttttggatttcatatagctgaatatattaaagtcatttatgttgctaaatccagtggcttctagtagagccatcgctatatcctttaactttaacatgtctactatttgtgtattcttctaatggggtagctgtctccaatttttgcgtaatggattagtgccactgtctagtagtagtttgacgacctcgacattattacaatgctcattaaaaaggtatgcgtgtaaagcattattcttaaattggttcctggtatcattaggatctctgtctttcaacatctgtttaagttcatcaagagccacctcctcattttccaaatagttaaacattttgactgaatagaagtgaatgagctactgtgaactctatacacccacacaactaatgttattaaatatcattttttgaatgtatttataccatgtcaaaaacttgtacaattattaataaaaataatttagtgtttaaattttaccagttccagattttacacctccgttaatacctccattaaccccactttttacaccactggacgatcctcctccccacattccaccgccaccagatgtataagttttagatcctttattactaccatcatgtccatggataaagacactccacatgccgccactaccccctttagaagacatattaataagacttaaggacaagtttaacaataaaattaatcacgagtaccctactaccaacctacactattatatgattatagtttctatttttacagtaccttaactaaagtctctagtcacaagagcaatactaccaacctacactattatataattatagtttctatttttataggaacgcgtacgagaaaatcaaatgtctaatttctaacggtagtgttgataaacgattatcgtcaatggatacctcctctatcatgtcgtctattttcttactttgttctattaacttattagcattatatattatttgattataaaacttatattgcttattagcccaatctgtaaatatcggattattaacatatcgtttctttgtaggtttatttaacatgtacatcactgtaagcatgtccgtaccatttattttaatttgacgcatatccgcaatttctttttcgcagtcggttataaattctatatatgatggatacatgctacatgtgtacttataatcaactaatatgaagtacttgatacatattttcagtaacgatttattattaccacctatgaataagtacctgtgatcgtctaggtaatcaactgtttttttaatacattcgatggttggtaatttactcagaataatttccaatatcttaatatataattctgctatt

SEQ ID NO: 3 - DNA, 16287 bp, Horsepox virus
aatgagctactgtgaactctatacacccacacaactaatgttattaaatatcattttttgaatgtatttataccatgtcaaaaacttgtacaattattaataaaaataatttagtgtttaaattttaccagttccagattttacacctccgttaatacctccattaaccccactttttacaccactggacgatcctcctccccacattccaccgccaccagatgtataagttttagatcctttattactaccatcatgtccatggataaagacactccacatgccgccactaccccctttagaagacatattaataagacttaaggacaagtttaacaataaaattaatcacgagtaccctactaccaacctacactattatatgattatagtttctatttttacagtaccttaactaaagtctctagtcacaagagcaatactaccaacctacactattatataattatagtttctatttttataggaacgcgtacgagaaaatcaaatgtctaatttctaacggtagtgttgataaacgattatcgtcaatggatacctcctctatcatgtcgtctattttcttactttgttctattaacttattagcattatatattatttgattataaaacttatattgcttattagcccaatctgtaaatatcggattattaacatatcgtttctttgtaggtttatttaacatgtacatcactgtaagcatgtccgtaccatttattttaatttgacgcatatccgcaatttctttttcgcagtcggttataaattctatatatgatggatacatgctacatgtgtacttataatcaactaatatgaagtacttgatacatattttcagtaacgatttattattaccacctatgaataagtacctgtgatcgtctaggtaatcaactgtttttttaatacattcgatggttggtaatttactcagaataatttccaatatcttaatatataattctgctatttctggaatatatttatctgccagtataacacaaatagtaatacatgtaaacccatattttgttattatattaatgtctgcgccattatctattaaccattctactaggctgacactatgcgacttaatacaatgataaagtatactacatccatgtttatctattttgtttatatcattaatatacggcttacaaagttttagtatcgataacacatccaactcacgcatagagaaggtagggaataatggcataatatttattaggttatcatcattgtcattatttacaactaagtttccattttttaaaatatactcgacaactttaggatctctattgccaaatttttgaaaatatttatttatatgcttaaatctatataatgtagctccttcatcaatcatacatttaataacattgatgtatactgtatgataagatacatattctaacaatagatcttgtatagaaactgtatatcttttaagaattgtggatattaggatattattacgtaaactattacacaattctaaaatataaaacgtatcacggtcgaataatagttgatcaactatataattatcgattttgtgatttttcttcctaaactgtttacgtaaatagttagatagaatattcattagttcataaccactatagttactatcgaataacgcgtcaaatatttcccgtttaatatcgcatttgtcaagataataatagagtgtggtatgttcacgataagtataataacgcatctcttttttgtgtgaaattaaatagtttattacgtccaaagatgtagcataaccatcttgtgacctagtaataatataataatagagaactgttttacccattctatcatcataatcagtggtgtagtcgtaatcgtaattgtctaattcatcatcccaattataatattcaccagcacgtctaatctgttttattttgatcttgtatccatactgtatgttgctacatgtaggtattcctttatccaataatagtttaaacacatctacattgggatttgatgttgtagcgtatttttctacaatattaataccatttttgatactatttatttctatacctttcgaaattagtaatttcaataagtttatatcgatgttatcagaacatagatattcgaatatatcaaaatcattgatatttttatagtcgactgacgacaataacaaaatcacaacatcgtttttgatattattatttttcttggtaacgtatgcctttaatggagtttcaccatcatactcatataatggatttgcaccactttctatcaatgattgtgcactgctggcatcgatgttaaatgttttacaactatcatagagtatcttatcgttaaccatgattggttgttgatgctatcgcattttttggtttctttcatttcagttatgtatggatttagcacgtttgggaagcatgagctcatatgatttcagtactgtagtgtcagtactattagtttcgatcagatcaatgtttagatctatagaatcaaaacacgataggtcagaagataatgaatatctgtacgcttctttttgtactgtaacttctggttttgttagatggttgcatcgtgctttaacgtcaatggtacaaattttatcctcgctttgtgtatcatattcgtctctagtataaaattctatattcagattatcatgcgatgtgtatacgctaacggtatcaataaacggagcacaccatttagtcataacagtaatccaaaattttttaaagtatatcttaacgaaagaagttgtgtcattgtctacggtgtatggtactagatcctcataagtgtatatatctagagtaatgtttaatttattaaatggttgataatatggatcgtcgtggcaatttcctaagacgaaaataagacataaacacgcaataaatctaattgcggacatggttactccttaaaaaaatactaataatcaccttggctatttagtaagtgtcatttaacactatactcatattaatccatggactcataatctctatacgggattaacggatgttctatatacggggatgagtagttttcttctttaactttatactttttactaatcatatttagactgatgtatgggtaatagtgtttaaaaagttcgttctcatcatcagaataaatcaatatctctgtttttttgttatacagatgtattacagcctcatatattacgtaataaaacgtgtcatctaccttattaacttccaccgcatagttgtttgcaaatacggttaatcctttgacctcgtcaatttccgaccaatctgggcgtataataaatctgaactttaattgcttgtacccatttgaaataatttttaatcgacatccgtagttatcccctttatgtaactgtaaatttctcaacgcgatatctccattaataatgatgtcgaattcgtgttgtatacccatactgaattgatgaactaacgaatatcaacggcgttaatagtaatttactttttcatctttacatactgggtactagttttactatcataagtttataaattccacaagctactatggaataagccaaccatcttagtataccacacatgtcttaaagtttattaattaattacatgttgttttatatatatcgctacgaatttaaagagaaattagtttaggaagaaaaaaattatctatctacatcatcgtctattggataacgtctctgtattctacgatagagtgctactttaagatgcgacagatctgtgtcatcaaatatatactccattaaaatgattattacggcagcgaacttgatattggatacatcacgacctttgttaatatccacgacaatagacagcaatcccatggttccataaacagtgagtttatctttctttgaagcgatagtttgtagagatcttataaaaccgtcaaacgacatcgcatttatatctttagctaattcatatatgttaccatcgtaatatctacccgcgtctatcttaaacgtttccatcgctttaaagacgtttccaatagatggtctcatttcatcagtcatactgagccaacaaatgtaatcgtgtataatatctttgatagaatcagactctaaaaaaaaggaatcggctttattatacacattcatgataaacttaatgaaaaatgtttttcgttgtttaagttggatgaatagtatgtcttaataattgttattatttcattaattaatatttagtaacgagtacactctataaaaatgaaaatgacataactaatcataactagttatcaaagtgtctaggacgcgtaattttcatatggtatagatcctgtaagcattgtctgtattctggagctattttctttatcgcattagtaagttcagaatatgttataaatttaaatcgaataacgaacatgactttagtaaagtcgtctatattaactcttttattttctagccatcgtaataccatgtttaagatagtatattctctagttactacgatctcatcgttgtctagaatatcacaactgaatctacatccaattttagaaattggtctgtgttacatatttcttctatattattgttgatgtattgtcgtagaaaactattacgtagaccattttctttataaaacgaatatatagtactccaattatctttaccgatatatttgcacacataatccattctctcaattactacatctttaagattttcgttgttaagatatttggctaaactatataattctattagatcatcaacagaatcagtatatatttttctagatacaaagacgaactctttggcgtcctctataatattcccagaaaagatattttcgtgttttagtttatcgagatctaatctgttcatatacgtatctatgattgtacggtacgttatgataaccgcataaaataaaaatccatttttatttttagctactattcataattgagattgatgtaatactttgttactttgaacgtaaagacagtacacggatccgtatctccaacaagcacgtagtaatcaaatttggtgttgttaaacttcgcaatatttatcaatttagatagaaacttatactcatcatctgttttaggaatccatgtattattaccactttccaacttatcattatcccaggctatgtttcgtccatcatcattgcgtagagtaaataattcttctgtattcggtagttcaaatatataatccatgcatagatcggtaaagctattgtagatgtgatttttcctaaatctaatataaaactcgtttactagcaaacattttcctgatttatcgaccaagacacatatggtttctaaatctatcaagtggtggggatccatagttatgacgcagtaacatagattattaccttcttaactgtcgctaatatctatatatttattgttatcgtattggattctgcatatagaacacataaccaatttatagtcgcgctttacattctcaaatctacagttaagagatttagaaaacattatatcctcggatgatgttatcactgtttctggagtaggatatattaaagtctttacagatttcgtccgattcaaataaattactaaataatatcccacattatcatctgttagagtagtatcattaaatctattatattttatgaaaaatatatcacttgctcacctctatatttcgtacatttttaaactgtttatataatatctctctgatataatcagatatatttattgtgtcggtagatgataccgttacatttgaattaatggtgttccattttacaacttttaacaagttgaccaattcatttttaatagtatcaaacgctccatgattaaatattttaatagtatccattttatatcactacggacacaaagtagctgacataaaccattgtataatttttatgttttatgcttattagcgtacacattttggaagttccggctgccatgtatttcctggagagcaagtagatgatgaggaaccagataggttatatccgtacttgcacttaaagtttacattgtcgttgtatgagtatgatcttttaaacccgctagacaagtatccgtttgatattgtaggatgtggacatttaacaatttgacacgtgggtggatcggaccattctcctcctgaacacaggacaccagagttaccaatcaacgaatatccactattgcaactataagttacaacgcttccatcggtataaaaatcctcgtatccgttatgtcttccgttggatatagatggagggaattggcatttaacagattcacaaataggtgcctcgggattccataccatagatccagtaaatcctaattcacaatacgatttagattctcctatcaactgatatccgctattacaagagtacgttatactagagccaaagtctactccgccaatatcaagttggccattatcgatatctcgaggcgatgggcatctccgtttaatacattgattaaagagtgtccatccagtacctgtacatttagcatatataggtcccattttttgctttctgtatccaggtagacatagatattctatagtgtctcctatgttgtaattagcattagcattagttttcacactattcttaaatttcatattaatgggacgtgaaggaataggacagtatgatagaacgcatcctattcccaacaatgtcaggaacgtcacgctctccaccttcatatttatttatccgtaaaaatgttatcctggacatcgtacaaataataaaaaagcccatatatgtttgctattgtagaaattgtttttcacagttgctcaaaaacgatggcagtgacttatgagttacgttacactttggagtttcatctttagtaaacatatcataatattcgatattacgagttgacatatcgaacaaattccaagtatttgattttggataatattcgtattttgcatctgctataattaagatataatcaccgcaagaacacacgaacatctttcctacatggttaaagtacatgtataattctatccatttgtcttccttaactatatatttgtatagataattacgagtctcataagtaattccagtaattgcatagatgtcaccatcgtactctacagcataaactatactatgatgtctaggcatgggagacttttttatccaacgatttttagtgaaacattctacatcgtttaatactacatatttctcatacgtggtataaactccacccattacatatatatcatcgtttacgaataccgatgcgcctgaatatctaggagtaattaagtttggaagtcttatccattttgaagtgccgtgtttcaaatattctgctacacccgttgaaatagaaaattctaatcctcctattacatataactttccattgttaacacaagtactaacttctgattttaacgacgacatattagtaaccgttttccattttttcgtttcaagatctacccgcgatacggaataaacatgtctattgttaatcatgccgccaataatgtatagacaattatgtaaaacatttgcattatagaattgtctatctgtattaccgactatcgtccaatattctgttctaggagagtaatgggttattgtggatatataatcagagtttttaatgactactatattatgttttataccatttcgtgtcactggctttgtagatttggatatagttaatcccaacaatgatatagcattgcgcatagtattagttataaacttgggatgtaaaatgttgatgatatctacatcgtttggatttttatgtatccactttaataatatcatagctgtaacatcctcatgatttacgttaacgtcttcgtgggataagatagttgtcagttcatcctttgataattttccaaattctggatcggatgtcactgcagtaatattgttgattatttctgacatcgacgcattatatagttttttaattccatattgtttagaaaagttaaacatccttatacaatttgtggaattaatattatgaatcatagtttttacacatatatctactacaggcgtaacatcaattattacggcagcaactagtatcatttctacattgtttatggtgatgtttatcttcttccagcgtatatagtctaatagcgattcaaacgcgtgatagtttataccattcaatataatcacttcatcatttatatggtgctcctgaattcgtttaaaaaaattatacggagatgccgtaataatttccttattcacttgtataatttccccattgatagaaaacgtcacgctttccattcttgaagtactataagtaattatagtataatgtaaacgtttatatattcaatatttttataaaaatcattttgacattaattcctttttaaatttccgtctatcatctatagaaacgtattctatgaatttataaaatgcttttacgtgtcctatcgtaggcgatagaaccgctaaaaagcctattgaatttctacaaaagaatctattatatggtatagggagagtataaaacattaaatgcccgtacttattaaagtattcagtagccaatcctaactctttcgaatacttattaatggctcttgttctgtacgaatctatttttttgaacaacggacctagtggtatatcttgttctatgtatctaaaataatgtctgactagatccgttagtttaatatcctcagtcatcttgtctagaatggcaaatctaactgcgggtttaggctttagtttagtttttatatctacatctatgtctttatctaacaccaaaaatataatagctaatattttattacaatcatccggatattcttctacgatctcactaactaatgtttctttggttatactagtatagtcacgattagacaaataaagaaaatcagatgatcgatgaataatacatttaaattcatcatctgtaagatttttgagatgtctcattaaaatattattagggtcagtactcattatcattaggcagctattacttattttatttttcaccatatagatcaatcattagatcatcaaaatatgtttcaatcatcctaaagagtatggtgaatgactcttcccatctaatttctgaacgttcaccaatgtctctagccactttggcactaatagcgatcattcgcttagcgtcttctatattattaactggttgattcaatctatctagcaatggaccgtcggacagcgtcattctcatgttcttaatcaatgtacatacatcgccgtcatctaccaattcatccaacaacataagctttttaaaatcatcattataataggtttgatcgttgtcatttctccaaagaatatatctaataagtagagtcctcatgattagtaatttaactattttagttaacaactattttttatgttaaatcaattagtacaccgatatgtttaatacttattcatattttagtttttaggattgagaatcaatacaaaaaattaatgcatcattaattttagaaatacttagtttccacgtagttaatgaaacatttgaactcatcgtacaggacgttctcgtacaggacgtaactataaaccggtttatatttgttcaagatagatacaaatccgataactttttttacgaattctacgggatccactttaaaagtgtcataccgggttctttttatttttttaaacagatcaatggtgtgatgttgattaggtcttttacgaatttgatatagaatagcgtttacatatcctccataatggtcaatcgccatttgttcgtatgtcataaattctttaattatatgacactgtgtattatttagttcatccttgttcatcattaggaatctatccaatatggcaattatactagaactataggtgcgttgtatacacatattgatgtgtctgtttatacaatcaatgatatttggatccatgctactaccttcgggtaaaattgtagcatcatataccatttctagtactttaggttcattattatccattgcagaggacgtcatgatcgaatcataaaaaaatatattatttttatgttattttgttaaaaataatcatcgaatacttcgtaagatactccttcatgaacataatcagttacaaaacgtttatatgaagtaaagtatctacgatttttacaaaagttaggatgcataagtacaaagtacgcgataaacggaataataatatatttatctagtttatctttttttatcgcgttcatagttagatacatagtctcagaagtaggattatgtaacatcagcttcgataaaatgacggttatttagttttacacattcgctcatacatgtatgaccgttaactacagagtctacactaaaatgattgaacaatagatagtctaccattgtttcgtattcagatagtacagcgtagtacatagcatcttcacaaattatatcaatgtctaatagatatttgacgcattttatggatcccacttcaacagccatcttaaaatcggtaaaatcatattgctttcctttatcattaataatttctaaaacatcatctctatcataaaagatacaaatattaactgtttgatcagtaataacattgctagtcgatagcaatttgttaataagatgcgctgggctcaatgtcttaataagaagtgtaagaggactatctccgaatttgttttgtttattaacatctgttgatggaagtaaaagatctataatgtctacatacttgactgttttaaagcatacaatatggagaggtgtatttccatcatgatctggttttgagggactaattcctagtttcatcatccatgagattgtagaagcttttggattgtctgacataagatgtctatgaatatgatttttgccaaatttatccactatcctggcttcaaatccgatggacattatttttttaaacactctttctgaaggatctgtacacgccaacaacagaccacatccttcttcatcaacctagttgttaatcttggctccatactgtaccaataaatttattctctctatgacttcatcatctgttcccgagagataatatagaggcgttttatgctgtttatcacacgcgtttggatctgcgccgtgcgtcagcagcatcgcgactattctattattaattttagaagctatatgcaatggataatttccatcatccgtctcatttggagagtatcctctatgaagaagttcttcgacaaatcgttcatctagtcctttaattccacaatacgcatgtagaatgtgataattatttccagaaggttcgatagcttgtagcatattcctaaatacatctaaatttttactattatatttggaataaagagatagataatactcggccgacataatgttgtccattgtagtataaaaattaatatttctatttctatttctgtatatttgcaacaatttactctctataacaaatatcataacttagttcttttatgtcaagaaggcactggtttagttcatctataaatgtcacgccataactaccacgcatgctatactcagaattatgataaagatatttatccttggggtgtaggtaatggggattaatctttgttggatcagtctctaagttaacacatgtcacacatgatccatttatagttatatcacacgatgatgatttatgaattgattccggaagatcgctatcgtattttgtggttccacaattcatttccatacatgttattgtcacactaatattatgatgaactttatctagccgctgagtggtaaacaacagaacagatagtttattatctttaccaacaccctcagccgctgccacaaatctctgatccgtatccatgatggtcatgtttatttctagtccgtatccagtcaacactatgttagcatttctgtcgatatagctttcactcatatgacactcaccaataatagtagaattaatgtcataatttacaccaatagtgagttcggcggcaaagtaccaataccggtaatcttgtcgaggaggacatatagtattcttgtattctaccgaatacccgagagatgcgatacaaaagagcaagactaatttgtaaaccatcttactcaaaatatgtaacaatagtacgatgcaatgagtaagacaataggaaatctatcttatatacacataattattctatcaattttaccaattagttagtgtaatgttaacaaaaatgtgggagaatctaattagtttttctttacacaattgacgtacatgagtctgagttccttgtttttgctaattatttcatccaatttattattcttgacgatatcgagatcttttgtataggagtcagacttgtattcaacatgcttttctataatcatcttagttattttagcatcatccaatagtacattttccagattaacagagtagatattaatgtcgtatttgaacagagcctgtagcatctcaatgtctttattatctatagccaatttaatgtcgggaatgaagagaagggaattgttagtgttggtaaatgccatatagtcgagcaagagaatcatcatatccacgtgtccattttttatagtgatgtgaatacaactaaggagaatagccagatcaaaagtagatggtatctctgaaagaaagtaggaaacaatacttacatcattaagcatgacggcatgataaaatgaagttttccatccagttttcccatagaacatcagtctccaatttttcttaacaaacagtttcaccgtttgcatgttaccactatcaaccgcataatacaatgcggtgtttcctttgtcatcaaattgtgaatcatccattccactgaatagcaaaatctttactattttggtatcttctaatgtggctgcctgatgtaatggaaattcattctctagaagatttttcaatgctccagcgttcaacaacgtacatactagacgcacgttattatcagctattgcataatacaaggcactatgaccgttgatatccgccttaaatgcatctttgctagagagaaagcttttcagctgcttagacttccaagtattaattcgtgacagatccatgtctgaaacgagacgctaattagtgtatattttttcattttttataattttgtcatattgcaccagaattaataatatctctaatagatctgattagtagatacatggctatcgcaaaacaacatatacacatttaataaaaataatatttattaagaaaattcagatttcacgtacccatcaatataaataaaataatgattccttacaccgtacccatataaacaatattaaggagattccaccttacccataaacaatataaatccagtaatatcatgtctgatgatgaacacaaatggtgtattaaattccagttcttcaggagatgatctcgccgtagctaccatgatagtagatgcctctgctacagttccttgttcgtcaacatctatctttgcattctgaaacattttataaatatataatgggtccctagtcatatgtttaaacgacgcattatctggattaaacatactaggagccatcatttcggctatcgacttaatatccctcttattttcgatagaaaatttagggagtttaagattgtacactttattccctaattgaaacgaccaatagtctaattttgcagccgtaatagaatctgtgaaatgggtcatattatcacctattgccaggtacatactaatattagcatccttatacggaaggcgtaccatgtcatattctttgtcatcgattgtgattgtatttccttgcaatttagtaactacgttcatcatgggaaccgttttcgtaccgtacttattagtaaaactagcattgcgtgttttagtgatatcaaacggatattgccatatacctttaaaatatatagtattaatgattgcccatagagtattattgtcgagcatattagaatctactacattaaacataccggatctacgttctactatagaattaattttattaaccgcatctcgtctaaagtttaatctatataggccgaatctatgatattgttgataatacaacggtttaatgcacacagtattatctacgaaactttgataagttagatcagtgtacgtatatttagatgttttcagcttagctaatcctgatattaattctgtaaatgctggacccagatctctttttctcaaatccatagtcttcaataattctattctagtattacctgatgcaggcaatagcgacataaacatagaaaacgaataaccaaacggtgagaagacaatattatcatcttcattcccatcttgaatatttttatacgctactataccggcattggtaaatccttgcagacgataggtagacactgaacacgttaacgatagtatcaataacgcaatcatgattttatggtattaataattaaccttatttttatgttcggtataaaaattattgatgtctacacatccttttgtaattgacatctatatatccttttgtataatcaactctaatcactttaacttttacagttttccctaccagtttatccctatatttaacatatctatccatatgcatcttaacactctctgccaagatagcttcaaagtgaggatagtcaaaaagataaatatatagagcataatcattctcgtatactctgccctttattacatcacccgcattgggcaacgaataacaaaatgcaagcatcttgttaacgggctcgtaaattgggataaaaattatgtttttattgattttatatctattttattcaagagaatattcaggaatttctttttccggttgtatctcatcgcagtatatatcatttgtacattgtttcatattttttaatagtttacaccttttagtaggactagtatcgtacaattcatagctgtattttgaattccaatcacgcataaaaatatcttccaattgttgacgaagacctaatccatcatccggtgtaatattaatagatgctccacatgtatccgtaaagtaatttcctgtccaatttgaggtacctatataggccgttttatcggttaccatatatttggcatggtttaccctagaatacggaatgggaggatcagcatctggtacaataaatagctttacttctatatttatgtttttagattttagcatagcgatagatcttaaaaagtttctcatgataaacgaagatcgttgccagcaactaatcaatagcttaacggatacttgtctgtctatagcggatcttcttaattcatcttctatataaggccaaaacaaaattttacccgccttcgaataaataatagggataaagttcataacagatacataaacgaatttactcgcatttctaatacatgacaataaagcggttaaatcattggttctttccatagtacatagttgttgcggtgcagaagcaataaatacagagtgtggaacaccacttacggtaatactaagaggatgatctgtattataatacgacggataaaagtttttccaattatatggtagattgttaactccaagataccagtatacctcaaaaatttgagtgagatccgctgccaagttcctattattgaagatcgcaatacccaattccttgacctgagttagtgatctccaatccatgttagcgcttcctaaataaatatgtgtattatcagatatccaaaattttgtatgaagaactcctcctaggatatttgtaatatctatgtatcgtacttcaactccggccatttgtagtctttcaacatcctttaatggtttgttagatttattgacggctactctaactcgtactcctcttttgggtaattgtacaatcttgtttaatattatcgtgccgaaattcgtacccacttcatccgataaactccaataaaaagatgatatatctagtgtttttgtggtattggatagaatttccctccacatgttaaatgtagacaaatatactttatcaaattgcatacctataggaatagtctctgtaatcactgcgattgtattatccggattcattttatttgttaaaagaataatcctatatcacttcactctattaaaaatccaagtttctatttctttcatga

SEQ ID NO: 4 - DNA, 31946 bp, Horsepox virus
ttattcaagagaatattcaggaatttctttttccggttgtatctcatcgcagtatatatcatttgtacattgtttcatattttttaatagtttacaccttttagtaggactagtatcgtacaattcatagctgtattttgaattccaatcacgcataaaaatatcttccaattgttgacgaagacctaatccatcatccggtgtaatattaatagatgctccacatgtatccgtaaagtaatttcctgtccaatttgaggtacctatataggccgttttatcggttaccatatatttggcatggtttaccctagaatacggaatgggaggatcagcatctggtacaataaatagctttacttctatatttatgtttttagattttagcatagcgatagatcttaaaaagtttctcatgataaacgaagatcgttgccagcaactaatcaatagcttaacggatacttgtctgtctatagcggatcttcttaattcatcttctatataaggccaaaacaaaattttacccgccttcgaataaataatagggataaagttcataacagatacataaacgaatttactcgcatttctaatacatgacaataaagcggttaaatcattggttctttccatagtacatagttgttgcggtgcagaagcaataaatacagagtgtggaacaccacttacggtaatactaagaggatgatctgtattataatacgacggataaaagtttttccaattatatggtagattgttaactccaagataccagtatacctcaaaaatttgagtgagatccgctgccaagttcctattattgaagatcgcaatacccaattccttgacctgagttagtgatctccaatccatgttagcgcttcctaaataaatatgtgtattatcagatatccaaaattttgtatgaagaactcctcctaggatatttgtaatatctatgtatcgtacttcaactccggccatttgtagtctttcaacatcctttaatggtttgttagatttattgacggctactctaactcgtactcctcttttgggtaattgtacaatcttgtttaatattatcgtgccgaaattcgtacccacttcatccgataaactccaataaaaagatgatatatctagtgtttttgtggtattggatagaatttccctccacatgttaaatgtagacaaatatactttatcaaattgcatacctataggaatagtctctgtaatcactgcgattgtattatccggattcattttatttgttaaaagaataatcctatatcacttcactctattaaaaatccaagtttctatttctttcatgactgattttttaacttcatccgtttccttatgaagatgatgtttggcaccttcataaatttttatttctctattacaatttgcatgttgcatgaaataatatgcacctaaaacatcgctaatcttattgtttgttccctggagtatgagagtcggggggggggggtgttaatcttggaaattatttttctaaccttgttggtagcctttaagacctgactagcaaatccagccttaattttttcatgattgattaatgggtcgtattggtatttataaactttatccatatctctagatactgattctggacatagctttccgactggcgcatttggtgtgatggttcccataagtttggcagctagcagattcagttttgaaacagcatctgcattaactagaggagacattagaatcattgctgtaaacaagtttggattatcgtaagaggctagtatagaaactgttgctcccatggaatgacccaataagaagactggaactcctaaataagtagatttaatagttaccacgtgctgtaccacatctctaacatacgtaccaaagtcatcaatcatcattttttcaccattacttcttccatgtccaatatgatcatgtgagaatactaaaattcctaacgatgatatgttttcagctagttcgtcataacgtccagaatgtttaccagctccatgacttatgaatactaatgccttaggatatgtaataggtttccaatatttacaatatatgtaatcattgtccagattgaacatacagtttgcactcatgattcacgttatataactatcaatattaacagttcgtttgatgatcatattatttttatgttttattgataattgtaaaaacatacaattaaattaatatagaggaaggagacggctactgtcttttgtgagatagtcatggcgactaaattagattatgaggatgctgttttttactttgtggatgatgataaaatatgtagtcgcgactccatcatcgatctaatagatgaatatattacgtggagaaatcatgttatagtgtttaacaaagatattaccagttgtggaagactgtacaaggaattgatgaagttcgatgatgtcgctatacggtactatggtattgataaaattaatgagattgtcgaagctatgagcgaaggagaccactacatcaattttacaaaagtccatgatcaggaaagtttattcgctaccataggaatatgtgctaaaatcactgaacattggggatacaaaaagatttcagaatctagattccaatcattgggaaacattacagatctgatgaccgacgataatataaacatcttgatactttttctagaaaaaaaattgaattgatgatataggggtcttcataacgcataattattacgttagcattctatatccgtgttaaaaaaaattatcctatcatgtatttgagagttttatatgtagcaaacatgatagctgtgatgccaataagctttagatattcacgcgtgctagtgttagggatggtattatctggtggtgaaatgtccgttatataatctacaaaacaatcatcgcatatagtatgcgatagtagagtaaacatttttatagtttctactggattcatacatcgtctacccaattcggttataaatgaaattgtcgccaatcttacacccaaccccttgttatccattagtatagtattaacttcgttatttatgtcataaactgtaaatgattttgtagatgccatatcatacatgatattcatgtccctattataatcattactaactttatcacaatatatgttgataatatctatatatgatctagtctttgtgggcaactgtctatacaagtcgtctaaacgttgtttactcatatagtatcgaacagccatcattacatggtcccgttccgttgatagataatcgagtatgttagtagacttgtcaaatctatataccatattttctggaagtggatatacatagtcgtgatcaacattattgctagcctcatcttctatatcatgtactataccattatctatatcctctatatcctgtactataccattatctatatcctctatatcctctatatcctgtactataccattatctatatcctctatatcatctacataatctacgatattattacacataaacatcgacaacatactattgtttattatctaagtcctgttgatccaaacccttgatctcctctatctgtactatctagagattgtacttctttcagttctggataatatatacgttgatagattagctgagctattctatctccagtatttacattaaacgtacattttccattattaataagaatgactcctatgtttcccctataatcttcgtctattacaccacctcctatatcaatgccttttagtgacagaccagacctaggagctattctaccatagcaaatcttaggcatggacatactaatatctgtcttaattaactgtctttctcctggagggatagtataatcgtaagcgctatacaaatcatatccggcagcacccggcgattgcctagtaggagatttagctctgttagtttccttaacaaatctaactggtgagttaatattcatgttgaacataaaactaatattttatttcaaaattatttaccatcccatatattccatgaataagtgtgatgattgtacacttctatagtatctatatacgattcacgataaaatcctcctatcaatagcagtttattatccactatgatcaattctggattatccctcggataaataggatcatctatcagagtccatgtattgctggattcacaataaaattccgcatttctaccaaccaagaataaccttctaccgaacactaacgcgcatgatttataatgaggataataagtggatggtccaaactgccactgatcatgattgggtagcaaatattctgtagttgtatcagtttcagaatgtcctcccattacgtatataacattgtttatagatgccactgctggattacatctaggtttcagaagactcggcatattaacccaagcagcatccccgtggaaccaacgctcaacagatgtgggatttggtagacctcctactacgtataatttattgttagcgggtatcccgctagcatacagtctggggctattcatcggaggaattggaatccaattgtttgatatataatttacagctatagcattgttatgtatttcattgttcatccatccaccgatgagatatactacttctccaacatgagtacttgtacacatatggaatatatctataatttgatccatgttcataggatactctatgaatggatacttgtatgatttgcgtggttgtttatcacaatgaaatattttggtacagtctagtatccattttacattatttatacctctgggagaaagataatttgacctgattacatttttgataaggagtagcagatttcctaatctatttcttcgctttatataccacttaatgacaaaatcaactacataatcctcatctggaacatttagttcatcgctttctagaataagtttcatagatagataatcaaaattgtctatgatgtcatcttccagttccaaaaagtgtttggcaataaagtttttagtatgacataagagattggatagtccgtattctatacccatcatgtaacactcgacacaatattcctttctaaaatctcgtaagataaagtttatacaagtgtagatgataaattctacagaggttaatatagaagcacgtaataaattgacgacgttatgactatctatatatacctttccagtatacgagtaaataactatagaagttaaactgtgaatgtcaaggtctagacaaaccctcgtaactggatctttatttttcgtgtatttttgacgtaaatgtgtgcgaaagtaaggagataactttttcaatatcgtagaattgactattatattgccacctatagcatcaataattgttttgaatttcttagtcatagacaatgctaatatattcttacagtacacagtattaacaaatatcggcatttatgtttctttaaaagtcaacatctagagaaaaatgattatcttcttgagacataactcccattttttggtattcacccacacgtttttcgaaaaaattagtttttccttccaatgatatattttccatgaaatcaaacggattggtaacattataaatttttttaaatcccaattcagaaatcaatctatccgcgacaaattctatatatgttttcatcatttcacaattcattcctataagtttaactggaagagccgcagtaagaaattcttgttcaatggatactgcatctgttataatagatctaacggtttcttcactcggtggatacaataaatgtttaaacatcaaacatgcgaagtcgcagtgtagaccctcgtctctactaattagttcgttggaaaacgtgagtccgggcattaggccacgctttttaagccaaaatatggaagcgaatgatccagaaaagaaaattccttctactgcagcaaaggcaataagtctctctccataaccggcgctgtcatgtatccacttttgagcccaatcggccttcttttttacacaaggcatcgtttctatggcattaaagagatagtttttttcattactatctttaacataagtatcgatcaaaagactatacatttccgaatgaatgttttcaatggccatctgaaatccgtagaaacatctagcctcggtaatctgtacttctgtacaaaatcgttccgccaaattttcattcactattccgtcactggctgcaaaaaacgccaatacatgttttataaaatatttttcgtctggtgttagtttattccaatcattgatatctttagatatatctacttcttccactgtccaaaatgatgcctctgcctttttatacatgttccagatgtcatgatattggattgggaaaataacaaatctatttggatttggtgcaaggatgggttccataactaaattaacaatatcaataaattttttttcagttatctatatgcctgtacttggattttttgtacatcgatatcgccgcaatcactacaataattacaagtattattgatagcattgttattagtactatcataattaaattatcgacattcatgggtgctgaataatcgttattatcatcattatcattttgtaattgtgacatcatactaaataaatcgtttgcgagattgttgtgggaagcgggcatggaggatgcattatcattattatttaacgccttccatttggattcacaaatgttacgcacattcaacattttatggaaactataattttgtgaaaacagataacaagaaaactcgttatcgttcaaatttttaacgatagtaaaccgattaaacgtcgagctaatttctaacgctagcgactctgttggatatgggtttccagatatatatcttttcagttcccctacgtatctataatcatctgtaggaaatggaagatatttccatttatctactgttcctaatatcatatgtggtggtgtagtaaaaccattaagcgcgaaagatgttattttgcatcgtattttaacttcgcaataatttctggttagataacgcactctaccagtcaagtcaatgatattagcctttacagatatattcatagtagtcgtaacgatgactccatcttttagatgcgatactcctttgtatgtaccagaatcttcgtaccgcaaactcgatatatttaaacaagttaatgagatattaacgcgttttatgaatgatgatatataaccagaagttttatcctcggtggctagcgctataaccttatcattataataccaactagtgtaattaatatgtgacacgttagtgtgggtacaaatatgtacattatcgtctacgtcgtattcgatacatccgcatacagccaacaaatataaaatgacaaatactctaacgccgttcgtacccatcttgatgcggtttaataaatgttttgatttcaatttattgtaaaaaaagattcggttttatactgttcgatattctcattgcttatattttcatctatcatctccacacagtcaaatccgtggttagcatgcacctcatcaaccggtaaaagactatcggactcttctatcattataactctagaatatttaatttggtcattattaatcaagtcaattatcttatttttaacaaacgtgagtattttactcattttttataaaaacttttagaaatatacagactctatcgtgtgtctatatcttctttttatatccaatgtatttatgtctgatttttcttcatttatcatatataatggtccaaattctacacgtgcttcggattcatccagatcattaaggttcttataattgtaacatccttctcttccctcttctacatcttccttcttatttttattcttattcttattcttagcgtcacagaatctaccacagcaggatcccatgacgagcgtcatattaaactaattcattttcaattataatatatgattagtaatgaccattaaaataaaaaatattcttcataaccggcaagaaagtgaaaagttcacattgaaactatgtcagtagtatacatcatgaaatgagatgaaatgatgatatatatatatatatactctattttggtggaggattatatgatataattcgtggataatcattcttaagacacatttctttattcgtaaatcttttcacgttaaatgagtgtccatattttgcaatttcttcatatgatggcggtgtacgtggacgaagctgctcctgttcttgttgtagtcgccgactgtcgtgtctgcgtttagatccctccattatcgcgattgcgtagatggagtactattttataccttgtaattaaatttttttattaattaaacgtataaaaacgttccgtatctgtatttaagagccagatttcgtctaatagaacaaatagctacagtaaaaataactagaataattgctacacccactagaaaccacggatcgtaatacggcaatcggttttcgataataggtggaacgtatattttatttaaggacttaacaattgtctgtaaaccacaatttgcttccgcggatcctgtattaactatctgtaaaagcatatgttgaccgggcggagccgaacattttccgatatccaatttctgtatatctataatattattaacctccgcatacgcattacagttcttttctagcttggataccgcactaggtacatcgtctagatctattcctatttcctcagcgatagctcttctatccttttccggaagcaatgaaatcacttcaataaatgattcaaccatgagtgtgaaactaagtcgagaattactcatgcatttgttagttattcggagcgcgcaatttttaaactgtcctataacctctcctatatgaatagcacaagtgacattagtagggatagaatgttgagctaatttttgtaaataactatctataaaaagattatacaaagttttaaactctttagtttccgccatttatccagtctgagaaaatgtctctcataataaatttttccaagaaactaattgggtgaagaatggaaacctttaatctatatttatcacagtctgtcttggtacacatgatgaattcttctaatgctgtactaaattcgatatctttttcgatttctggatatgtttttaataaagtatgaacaaagaaatgaaaatcgtaataccagttatgtttaactttgaaattgttttttattttcttgttaatgattccagccacttgggaaaagtcaaagtcgtttaatgccgatttaatacgttcattaaaaacaaactttttatcctttagatgaattattattggttcattggaatcaaaaagtaagatattatcgggtttaagatctgcgtgtaaaaagttgtcgcagcatggtagttcgtaaattttaatgtataacagagccatctgtaaaaagataaactttatgtattgtaccaaagatttaaatcctaatttgatagctaactcggtatctactttatctgcagaatacagtgctaggggaaaaattataatatttcctctttcgtattcgtagttagttctcttttcatgttcgaaaaagtgaaacatgcggttaaaatagtttataacattaatattactgttaataactgccggataaaagtgggatagtaatttcacaaatttgatactgtcctttctctcgttaaacgcctttaaaaaaactttagaagaatatctcaatgagagttcctgaccatccatagtttgtatcaataatagcaacatatgaagaacccgtttatacagagtatgtaaaaatgttaatttatagtttaatcccatggcccacgcacacacgattaattttttttcatctccctttagattgttgtatagaaatttgggtactgtgaactccgccgtagtttccatgggactatataattttgtggcctcgaatacaaattttactacatagttatctatcttaaagactataccatatcctcctgtagatatgtgataaaaatcgtcgtttataggataaaatcgtttatccttttgttggaaaaaggatgaattaatgtaatcattctcttctatctttagtagtgtttccttattaaaattcttaaaataatttaacaatctaactgacggagcccaattttggtgtaaatctaattgggacattatgttgttaaaatataaacagtctcctaatataacagtatctgataatctatggggagacatccattgatattcaggggatgaatcattggcaacacccatttattgtacaaaaagccccaatttacaaacgaaagtccaggtttgatagagacaaactattaactattttgtctctgtttttaacacctccacagtttttaatttctttagtaatgaaattattcacaatatcagtatcttctttatctaccagagattttactaacttgataaccttggctgtctcattcaatagggtagtgatatttgtatgtgtgatattgatatctttttgaattgtttcttttagaagtgattctttgatggtgtcagcatacgaattacaataatgcagaaactcagttaacatgcaggaattatagtaagccaattccaattgttgcctgtattgtattagagtattaatatgcgcaatggtgtccttgcgtttctctgatagaatgcgagcagcgattttggcgttatcatttgacgatatttctggaatgacgaatcctgtttctactaactttttggtaggacaaagtgaaacaatcaagaagatagcttctcctcctatttgtggaagaaattgaactcctctagatgatctactgacgatagtatctccttgacagatattggaccgaattacagaagtacctggaatgtaaagccctgaaaccccctcattttttaagcagattgttgccgtaaatcctgcactatgcccaagatagagagctcctttggtgaatccatctctatgtttcagtttaaccaagaaacagtcagctggtctaaaatttccatctctatctaatacagcatctaacttgatgtcaggaactatgaccggtttaatgttatatgtaacattgagtaaatccttaagttcataatcatcactgtcatcagttatgtacgatccaaacaatgtttctactggcatagtggatacgaagatgctatccatcagaatgtttccctgattagtattttctatatagctattcttctttaaacgattttccaaatcagtaactatgttcatttttttaggagtaggacgcctagccagtatggaagaggattttctagatcctctcttcaacatctttgatctcaatggaatgcaaaaccccatagtgaaacaaccaacgatgtaacaaccaacgataaaaataatattgtttttcactttttataattttaccatctgactcatggattcattaatatctttataagagctactaacgtataattctttataactgaactgagatatatacaccggatctatggtttccataattgagtaaatgaatgctcggcaataactaatggcaaatgtatagaacaacgaaattatactagagttgttaaagttaatattttctatgagctgttccaataaattatttgttgtaactgcgttcaagtcataaatcatcttgatactatccagtaaaccgtttttaagttctggaatattatcatcccattgtaaagcccctaattcgactatcgaatatcctgctctgatagcagtttcaatatcgacggacgtcaatactgtaataaaggtggtagtattgtcatcatcgtgataaactactggaatatggtcgttagtaggtacggtaactttacacaacgcgatatataactttccttttgtaccatttttaacgtagttgggacgtcctgcagggtattgttttgaagaaatgatatcgagaacagatttgatacgatatttgttggattcctgattatttactataatataatctagacagatagatgattcgataaatagaaaaggtatatcgttggtaggataatacatccccattccagtattctcggatactctattaatgacactagttaagaacatgtcttctattctagaaaacgaaaacatcctacatggactcattaaaacttctaacgctcctgattgtgtctcgaatgcctcgtacaaggatttcaaggatgccatagattctttgaccaacgatttagaattgcgtttagcatctgatttttttattaaatcgaatggtcggctctctggtttgctaccccaatgataacaatagtcttgtaaagataaaccgcaagaaaatttatacgcatccatccaaataaccctagcaccatcggatgatattaatgtattattatagattttccatccacaattattgggccagtatactgttagcaacggtatatcgaatagattactcatgtaacctactagaatgatagttcgtgtactagtcataatatctttaatccaatctaagaaatttaaaattagattttttacactgttaaagttaacaaaggtattacccggatacgtggatatcatatatggcattggtccattatcagtaatagctccataaactgatacggcgatggtttttatatgtgtttgatctaacgaggaagaaattcgcgcccacaattcatctctagatatgtatttaatatcaaacggtaacacatcaatttcgggacgcgtatatgtttctaaatttttaatccaaatataatgatgacctatatgccctattatcatactgtcaactatagtacacctagagaacttacgatacatctgtttcctataatcgttaaattttacaaatctataacatgctaaaccttttgacgacaaccattcattaatttctgatatggaatctgtattctcgataccgtattgttctaaagccagtgctatatctccctgttcgtgggaacgctttcgtataatatcgatcaacggataatctgaagtttttggagaataatatgactcatgatctatttcgtccataaacaatctagacataggaattggaggcgatgatcttaattttgtgcaatgagtcgtcaatcctataacttctaatcttgtaatattcatcatcgacataatactatctatgttatcatcgtatattagtataccatgaccttcttcatttcgtgccaaaatgatatacagtcttaaatagttacgcaatatctcaatagtttcataattgttagctgttttcatcaagatttgtaccctgtttaacatgatggcgttctatacgtttctattttctattttttaaatttttaacgatttactgtggctagatacccaatctctctcaaatatttttttagcctcgcttacaagctgtttatctatactattaaaactgacgaatccgtgattttggtaatgggttccgtcgaaatttgccgaagtgatatgaacatattcgtcgtcgactatcaacaattttgtattattctgaatagtgaaaaccttcacagatagatcattttgaacacacaacgcatctagacttttggcggttgccatagaatatacgtcgttcttatcccaattaccaactagaagtctgatcttaactcctctattaatggctgcttctataatggagttgtaaatgtcgggccaatagtagctattaccgtcgacacgtgtagtgggaactatggccaaatgttcaatatctatactagtcttagctgacctgagtttatcaataactacatcggtatctagatctctagaatatcccaataggtgttccggagaatcagtaaagaacactccacctataggattcttaatatgatacgcagtgctaactggcaaacaacaagccgcagagcataaattcaaccatgaattttttgcgctattaaaggctttaaaagtatcaaatcttctacgaagatctgttgccagcgggggataatcagaatatacacctaacgttttaatcgtatgtatagatcctccagtaaatgacgcgtttcctacataacatctttcatcatctgacacccaaaaacaaccgagtagtagtcccacattattttttttatctatattaacggttataaaatttatatccgggcagtgactttgtagctctcccagatttcttttccctcgttcatctagcaaaactattattttaatccctttttcagatgcctcttttagtttatcaaaaataagcgctcccctagtcgtactcagaggattacaacaaaaagatgctatgtatatatatttcttagctagagtgataatttcgttaaaacattcaaatgttgttaaatgatcggatctaaaatccatattttctggtagtgtttctaccagcctacattttgctcccgcaggtaccgatgcaaatggccacatttagttaacataaaaacttatacatcctgttctatcaacgattctagaatatcatcggctatatcgctaaaattttcatcaaagtcgacatcacaacctaactcagtcaatatattaagaagttccatgatgtcatcttcgtttatttctatatccgtatccattgtagattgttgaccgattatcgagtttaaatcattactaatactcaatccttcagaatacaatctgtatttcattgtaaatttataggcggtgtatttaagttggtagattttcaattatgtattaatatagcaacagtagtttttgctcctccttgattctagcatcctcttcattattttcttctacgtacataagcatgtccaatacgttagacaacacaccaacgatggcggccgccacagacacgaatatgactaaaccgatgaccatttaaaaacccctctctagctttcacttaaactgtatcgattattcttttagaacatgtataatataaaaacattattctatttcgaatttaggcttccaaaaatttttcatccgtaaaccgataataatatatatagacttgttaatagtcggaataaatagattaatgcttaaactatcatcatctccacgattagagatacaatatttacattttttttgctgtttcgaaactttatcaatacacgttaatacaaacccaggaaggagatattgaaactgaggctgttgaaaatgaaacggtgaatacaataattcagataatgtaaaatcatgattccgtattctgatgatattagaactgctaatggatgtcgatggtatgtatctaggagtatctattttaacaaagcatcgatttgctaatatacaattatccttttgattaattgttattttattcatattcttaaaaggtttcatatttatcaattcttctacattaaaaatttccatttttaatttatgtagccccgcaatactcctcattacgtttcattttttgtctataatatccattttgttcatctcggtacatagattatccaattgagaagcgcatttagtagttttgtacattttaagtttattgacaaatcgtcgaaaactagttatagttaacattttattatttgataccctgatattaatacccctgccgttactattatttataactgatgtaatccacgtaacattggaattaactatcgatagtaatgcatcgacgcttccaaaattgtctattataaactcaccgataatttttttattacatgttttcatattcattaggattatcaaatctttaatcttactacgattgtatgcgttgatattgcaagacgtcattctaaaagacggaggatctccatcaaatgccaaacaatcacgtacaaagtacatggaaataggttttgttctattgcgcatcatagatttatatagaacacccgtagaaatactaatttgttttactctataaaatactaatgcatctatttcatcgttttgtataacgtctttccaagtgtcaaattccaaatttttttcattgatagtaccaaattcttctatctctttaactacttgcatagataggtaattacagtgatgcctacatgccgttttttgaaactgaatagatgcgtctagaagcgatgctacgctagttacaatcaccactttcatatttagaatatatatatgtaaaaatatagtagaatttcattttgtttttttctatgctataaatgaattctcattttgcatctgctcatactccgttttatattaataccaaagaaggaaaatatttggttctaaaagccgttaaagtatgcgatgttagaactgtagaatgtgaaggaagtaaagcttcctgcgtactcaaagtagataaaccctcatcacccgcgtgtgagagaagaccttcgtccccttccagatgcgagagaatgaataacccaggaaaacaagttccgtttatgaggacggacatgctacaaaatatgttcgcggctaatcgcgataatgtagcttctagacttttgtcctaaaatactattatatccttttcgatattaataaatccgtgtcgtccaggttttttatctctttcagtatgtgaatagataggtattttatctctattcatcatcgaatttaagagatccgataaacattgtttgtattctccagatgtcagcatctgatacaacaatatatgtgcacataaacctctggcacttatttcatgtaccttccccttatcactaaggagaatagtatttgagaaatatgtatacatgatattatcatgaattagatatacagaatttgtaacactctcgaaatcacacgatgtgtcggcgttaagatctaatatatcactcgataacacattttcatctagatacactagacattttttaaagctaaaatagtctttagtagtgacagtaactatgcgattattttcatcgatgatacatttcatcggcatattattacgcttaccatcaaagactataccatgtgtatatctaacgtattctagcatggttgccatacgcgcattaaacttttcaggatctttggatagatcttccaatctatctatttgagaaaacatttttatcatgttcaatagttgaaacgtcggatccactatatagatattatctataaagattttaggaactacgttcatggtatcctggcgaatattaaaactatcaatgatatgattatcgttttcatcttttatcaccatatagtttctaagatatgggattttacttaatataatattatttcccgtgataaattttattagaaaggccaaatctataagaaaagtcctagaattagtctgaagaatatctatatcgccgtatagtatatttggattaattagatatagagaatatgatccgtaacatatacaacttttattatggcgtctaagatattcttccatcaacttattaacatttttgactagggaagatacattatgacgtcccattacttttgccttgtctattattgcgacgttcatagaatttagcatatctcttgccaattcttccattgatgttacattataagaaattttagatgaaattacatttggagctttaatagtaagaactcctaatatgtccgtgtatgtggtcactaatacagattgtagttctataatcgtaaataatttacctatattatatgtttgagtctgtttagaaaagtagctaagtatacgatcttttatttctgatgcagatgtattaacatcggaaaaaaatctttttttattcttttttactaaagatacaaatatgtctttgttaaaaacagttattttttgaatatttctagcttgtaattttaacatatgatattcgttcacactaggtactctgcttaaataggtttctataatctttaatgtaatattaggaaaagtattctgatcaggattcctattcattttgaggatttaaaactctgattattgtctaatatggtctctacgcaaactttttcacagagcgatagagtttttgataactcgtttttcttaagaaatataaaactactgtctccagagctcgctctatcttttattttatttaattcgatacaaactcctgatactggttcagaaagtaattcattaattttcagtcctttatagaagatatttaatatagataatacaaaatcttcagtttttgatatcgatctgattgatcctagaactagatatattaataacgtgctcattaggcagtttatggcagcttgataattagatatagtatattccagttcatatttattagataccgcattgcccagattttgatattctatgaattcctctgaaaataaatccaaaataactagacattctattttttgtggattagtgtactctcttccctctatcatgttcactactggtgtccacgatgataaatatctagagggaatataatatagtccataggatgccaatctagcaatgtcgaataactgtaattttattcttcgctcttcattatgaattgattcttgaggtataaacctaacacaaattatattattagacttttcgtatgtaatgtctttcatgttataagtttttaatcctggaatagaatctattttaatgaggcttttaaacgcagagttctccaacgagtcaaaacataatactctgttggttttcttatatacaatattacgattttcttctttgaatggaataggtttttgaattagtttataattacaacataatagataaggaagtgtgcaaatagtacgcggaaaaaacataatagctcccctgtttttatccatggttttaagtaaatgatcactggcttctttagttaatggatattcgaacattaaccgtttcatcatcattggacagaatccatattttttaatgtaaagagtgatcaaatcattgtgtttattgtaccatcttgttgtaaatgtgtattcggttatcggatctgctcctttttctattaaagtatcgatatcgatctcgtctaagaattcaactatatcgacatatttcatttgtatacacataaccattactaacgtagaatgtataggaagagatgtaacgggaacagggtttgttgattcgcaaactattctaatacataattcttctgttaatacgtcttgcacgtaatctattatagatgccaagatatctatataattattttgtaagatgatgttaactatgtgatctatataagtagtgtaataattcatgtattttgatatatgttccaactctgtctttgtgatgtctagtttcgtaatatctatagcatcctcaaaaaatatattcgcatatattcccaagtcttcagttttatcttctaaaaaatcttcaacgtatggaatataataatctattttacctcttctgatatcattaatgatataatttttgacactatcttctgtcaattgattcttattcactatatctaagaaacggatagcgtccctaggacgaactacttccattaatatctctattatagcttctggacataattcatctattataccagaattaatgggaactattccgtatctatctaacatagttttaagaaagtcagaatctaagacttgatgttcatatattggttcatacatgaaatgatttctattgatgatagtgactatttcgttctctgaaaattggtaactcattttatatatgctttccttgttgatgaaggataggatatactcaatagaatttgtaccaacaaactgttctcttatgaatcgtatatcatcatctgaaataatcatgtaaggcatacatttaacaattagagacttgtctcctgttatcaatatactattcttgtgataatttatgtgtgaggcaaatttgtccacgttctttaattttgttatagtagatatcaaatccaatggagctacagttcttggcttaaacagatatagtttttctggaacaaattctacaacattattataaaggactttgggtagataagtgggatgaaatcctattttaattaatgctatcgcattgtcctcgtgcaaatatccaaacgcttttgtgatagtatgacattcattatctagaaacgctctacgaatatctgtcacagatatcatctttagagaatactagttgcgttaatagtactaaaatttgtattttttttaatatatctcaaaaaaaattaatatttatggatccgatgtataattagaatcagaatctaatgatgacgtacccaagaagtttatctacagccaatttagctgcattatttttagcatctcgtttagattttccatcggccttatcgaatactcttccgtcgatatctacacaggcataaaatgtaggagagttactaggcccaactgattcaatacgaaaagaccaatctctcttagttatttggcagtactcattaataatggtgacagggttagcatctttccaatcaataatttttttagccggaataacatcatcaaaagacttatgatcctctctcattgatttttcgcgggatacatcatctattatgacgtcagccatagcatcagcatccggcttatccgcctccgttgtcataaaccaacgaggaggaatatcgtcggagctgtacaccatagcactacgttgaagatcgtacagagctttattaacttctcgcttctccatattaagttgtctagttagttgtgcagcagtagctccttcgattccaatggttttaatagcctcacacacaatctctgcgttagaacgttcgttgatatagattttagacattttagagagaactaacgcaatcagtaataaaactaatttattttatcattttttttattcatcatcctctggtggttcgtcgtttctatcgaatgtagctctgattaacccgtcatctataggtgatgctggttctggagattctggaggagatggattattatctggaagaatctctgttatttccttgttttcatgtatcgattgcgttgtaacattaagattgcgaaatgctctaaatttgggaggcttaaagtgttgtttgcaatctctacacgcgtgtctaactagtggaggttcgtcagctgctctagtttgaatcatcatcggtgtagtattcctacttttacagttaggacacggtgtattgtatttctcgtcaagaacgttaaaataatcgttgtaacttacatcctttattttatctatattgtattctactcctttcttaatgcattttataccgaataagagatagcgaaggaattctttttcggtgccgctagtacccttaatcatatcacatagtgttttatattccaaatttgtggcaatagacggtttatttctatacgatagtttgtttttggaatcctttgagtattctataccaatattattctttgattcgaatttagtttcttcgatattagattttgtattacctatattcttgatgtagtactttgatgatttttccatggcccattctattaagtcttccaagttggcatcatccacatattgtgatagtaattctcggatatcagtagcggttaccgccattgatgtttgttcattggatgagtaactactaatgtatacattttccatttataacacttatgtattaactttgttcatttatattttttcattattatgttgatattaacaaaagtgaatatatatgttaataattgtattgtggttatacggctacaattttataatgagtgaaagtcagtgtccgatgatcaatgacgatagctttactctgaaaagaaagtatcaaatcgatagtgcggagtcaacaataaaaatggataagaagaggataaagtttcagaatagagccaaaatggtaaaagaaataaatcagacaataagagcagcacaaactcattacgagacattgaaactaggatacataaaatttaagagaatgattatgactactactctagaagatatagcaccatctattccaaataatcagaaaacttataaactattctcggacatttcagccatcggcaaagcatcacggaatccaagtaagatggtatatgctctgctgctttacatgtttcccaatttgtttggagatgaccatagattcattcgttatagaatgcatccaatgagtaaaatcaaacacaagatcttctctcctttcaaacttaatcttattagaatattagtggaagaaagattctataataatgaatgcagatctaataaatggagaataattggaacacaagttgataaaatgttgatagctgaatctgataattatacaatagatgcaaggtataacctaaaacccatgtatagaatcaagggagaatctgaagaagataccctctttatcaaacagatggtagaacaatgtgtgacatcccaggaattggtggaaaaagtgttgaagatactgtttagagatttgttcaagagtggagaatacaaagcgtacagatacgatgatgatgtagaaaatggatttattggattggatacactaaaattaaacattgttcatgatatagttgaaccatgtatgcctgttcgtaggccagtggctaagatactgtgtaaagaaatggtaaataaatactttgagaatccgctacatattattggtaaaaatcttcaagagtgcattgactttgttagtgaataggcatttcatctttctccaatactaattcaaattgttaaattaataatggatagtataaatagttattagtgataaaatagtaaaaataattattagaataagagtgtagtatcatagataactctcttctataaaaatggattttattcgtagaaagtatcttatatacacagtagaaaataatatagattttttaaaggatgatacattaagtaaagtaaacaattttaccctcaatcatgtactagctctcaagtatctagttagcaattttcctcaacatgttattactaaggatgtattagctaataccaatttttttgttttcatacatatggtacgatgttgtaaagtgtacgaagcggttttacgacacgcatttgatgcacccacgttgtacgttaaagcattgactaagaattatttatcgtttagtaacacaatacaatcgtacaaggaaaccgtgcataaactaacacaagatgaaaaatttttagaggttgccaaatacatggacgaattaggagaacttataggcgtaaattatgacttagttcttaatccattatttcacggaggggaacccatcaaagatatggaaatcatttttttaaaactgtttaagaaaacagacttcaaagttgttaaaaaattaagtgttataagattacttatttgggcatacctaagcaagaaagatacaggcatagagtttgcggataatgatagacaagatatatatactctatttcaacaaactggtagaatcgtccatagcaatctaacagaaacgtttagagattatatctttcccggagataagactagctattgggtgtggttaaacgaaagtatagctaatgatgcggatatcgttcttaatagacacgccattaccatgtatgataaaattcttagttatatatactctgagataaaacaaggacgcgttaataaaaacatgcttaagttagtttatatctttgagcctgaaaaagatatcagagaacttctgctagaaatcatatatgatattcctggagatatcctatctattattgatgcaaaaaacgacgattggaaaaaatattttattagtttttataaagctaattttattaacggtaatacatttattagtgataaaacgtttaacgaggacttattcagagttgttgttcaaataaatcccgaatatttcgataatgaacgaattatgtctttattctctacgagtgctgcggacattaaacgatttgatgagttagatattaataacagttatatatctaatataatttatgaggtgaacgatatcacattagatacaatggatgatatgaagaagtgtcaaatctttaacgaggatacgttgtattatgttaaggaatacaatacatacctgtttttgcacgagtcggatcccatggtcatagagaacggaatactaaagaaactgtcatctataaaatccaagagtagacggctgaacttgtttagcaaaaacattttaaaatattatttagacggacaattggctcgtctaggtcttgtgttagataattataaaggagacttgttagttaaaatgataaaccatcttaagtctgtggaggatgtatccgcattcgttcgattttctacagataaaaaccctagtattcttccatcgctaatcaaaactattttagctagttataatatttccatcatcgtcttatttcaaaggtttttgagagataatctatatcatgtagaagaattcttggataaaagcatccatctaaccaagacggataagaaatatatacttcaattgataagacacggtagatcatagaacagaccaaatatattattaataatttgtatatacatagatataattatcacatattaaaaattcacacatttttgataaatgggaactgctgcaacaattcagactcccaccaaattaatgaataaagaaaatgcagaaatgattttggaaaaaattgttgatcatatagttatgtatattagtgacgaatcaagtgattcagaaaataatcctgaatatattgattttcgtaacagatacgaagactatagatctctcattataaaaagtgatcacgagtttgtaaagctatgtaaaaatcatgcggagaaaagttctccagaaacgcaacaaatgattatcaaacacatatacgaacaatatcttattccagtatctgaagtactattaaaacctataatgtccatgggtgacataattacatataacggatgtaaagacaatgaatggatgctagaacaactctctaccctaaactttaacaatctccgcacatggaactcatgtagcataggcaatgtaacgcgtctgttttatacattttttagttatctgatgaaagataaactaaatatataagtataatcccattctaatactttaacctgatgtattagcatcttattagaatattaacctaactaaaagacataacataaaaactcattacatagttgataaaaagcggtaggatataaatattatggctgccaccgttccgcgttttgacgacgtgtacaaaaatgcacaaagaagaattctagatcaagaaacattttttagtagaggtctaagtagaccgttaatgaaaaacacatatctatttgataattacgcgtatggatggataccagaaactgcaatttggagtagtagatacgcaaacttagatgcaagtgactattatcccatttcgttgggattacttaaaaagttcgagtttctcatgtctctatataaaggtcctattccagtatacgaagaaaaagtaaatactgaattcatagccaatggatcgttctctggtagatacgtatcatatcttcgaaagttttctgctcttccaacaaacgagtttattagttttttgttactgacttccattccaatctataatatcttgttctggtttaaaaatactcagtttgatattactaaacacacattattcagatacgtctatacagataatgccaaacacctggcgttggctaggtatatgcatcaaacaggagactataagcctttgtttagtcgtctcaaagagaattatatatttaccggtcccgttccaataggtatcaaagatatagatcaccctaatcttagtagagcaagaagtccatccgattatgagacattagctaatattagtactatattgtactttaccaagtatgatccggtattaatgtttttattgttttacgtacctgggtattcaattactacaaaaattactccagcagtagagtatctaatggataaactgaaactaacaaagagcgatgtacaactgttgtgaatattttatgcttcgtaaaatgtaggttttgaaccaaacattctttcaaagaatgagatacataaaactttattatccaataaattgactatttcggatgtcaatcgtttaaagtaaacttcgtaaaatattctttgatcactgccgagtttaaaacttctatcgataattgtctcatatgttttaatatttacaagttttttggtccatggtacattagccggacaaatatatgcaaaataatatcgttctccaagttctatagtttctggattatttttattatattcagtaaccaaatacatattagggttatctgcggatttataatttgagtgatgcattcgactcaacataaataattctagaggagacgatctactatcaaattcggatcgtaaatctgtttctaaagaacggagaatatctatacatacctgattagaattcatccgtcctttagacaacatttcagacagtctggttttgtacatcttaatcatattcttatgaaacttggaaacatctcttctagtttcactagtacctttattaattctctcaggtacagattttgaattcgacgatgctgagtatttcatcgttgtatatttcttcttcgattgcataatcagattcttatataccgcctcaaactctattttaaaattattaaacaatactctattattaatcagttgttctaactctttcgctatttctatagacttatcgacatcttgactgtctatctctgtaaacacggagtcggtatctccatacacgctacgaaaacgaaatctgtaatctataggcaacgatgtttttacaatcggattaatatctctatcgtccatataaaatggattacttaatggattggcaaaccgtaacataccgttagataactctgctccatttagtaccgattctagatacaagatcattctacgtcctatggatgtgcaactcttagccgaagcgtatgagtatagagcactatttctaaatcccatcagaccatatactgagttggctactattttgtacgtatattgcatggaatcataaatggccttttcagttgaactggtagcctgttttagcatctttttatatctagctctctctgccaaaaatgttcttaatagtctaggaatggttccttctattgatctatcgaaaattgctatttcagagatgaggttcggtagtctaggttcacaatgaaccgtaatatatctaggaggtggatatttctgaagcaatagctgattatttatttcttcttccaatctattggtactaacaacgacaccgactaatgtttccggagatagatttccaaagatacacacattaggatacagactgttataatcaaagattaatacattattactaaacattttttgttttggagcaaataccttaccgccttcataaggaaacttttgttttgtttctgatctaactaagatagttttagtttccaacaatagctttaacagtggacccttgatgactgtactcgctctatattcgaataccatggattgaggaagcacatatgttgacgcacccgcgtctgtttttgtttctactccataatactcccacaaatactgacacaaacaagcatcatgaatacagtatctagccatatctaaagctatgtttagattataatccttatacatctgagctaaatcaacgtcatcctttccgaaagataatttatatgtatcattaggtaaagtaggacataatagtacgactttaaatccattttcccaaatatctttacgaattactttacatataatatcctcatcaacagtcacataattacctgtggttaaaacctttgcaaatgcagcggctttgcctttcgcgtctgtagtatcgttaccgatgaacgtcatttctctaactcctctatttaatactttacccatgcaactgaacgcgttcttggatatagaatccaatttgtacgaatccaatttttcagatttttgaatgaatgaatatagatcgaaaaatatagttccattattgttattaacgtgaaacgtagtattggccatgccgcctactcccttatgactagactgatttctctcataaatacagagatatacagcttcctttttgtctggagatctaaagataatcttctctcctgttaataactctagacgattagtaatatatctcagatcaaagttatgtccgttaaaggtaacgacatagtcgaacgttagttccaacaattgtttagctattcgtaacaaaactatttcagaacataaaactagttctcgttcgtaatccatttccattagtgactgtatcctcaaacatcctctatcgacggcttcttgtatttcctgttctgttaacatctcttcattaatgagcgtaaacaataatcgtttaccacttaaatcgatataacagtaacttgtatgcgagattgggttaataaatacagaaggaaacttcttatcgaagtgacactctatatctagaaataagtacgatcttgggatatcgaatctaggtatttttttagcgaaacagttacgtggatcgtcacaatgataacatccattgttaatctttgtcaaatattgctcgtccaacgagtaacatccgtctggagatatcccgttagaaatataaaaccaactaatattgagaaattcatccatggtggcattttgtatgctgcgtttctttggctcttctatcaaccacatatctgcgacggagcattttctatctttaatatctagattataacttattgtctcgtcaatgtctatagttctcatctttcccaacggcctcgcattaaatggaggaggagacaatgactgatatatttcgtccgtcactacgtaataaaagtaatgaggaaatcgtataaatacggtctcaccatttcgacatctggatttcagatataaaaatctgttttcaccgtgactttcaaaccaattaatgcaccgaacatccatttatagaatttagaaatatattttcatttaaatgaatcccaaacattggggaagagccgtatggaccattatttttatagtactttcgcaagcgggtttagacggcaacatagaagcgtgtaaacgaaaactatatactatagttagcactcttccatgtcctgcatgtagacggcacgcgactattgctatagaggacaataatgtcatgtctagcaatgatctgaattatatttattattttttcatcagattatttaacaatttggcatctgatcccaaatacgcaatcaatgtgtcaaaggttaaacctttataaacttaacccattataaaacttatgattagtcacgactgaaataaccgcgtgattattttttggtataattctacacggcatggtttctgtaactatgaattcaacccccgttacattagtgaaatctttaacaaacagcaagggttcgtcaaagacataaaactcattgtttacaatcgaaatagaccccctatcacacttaaaataaaaaatatccttatcctttaccaccaaataaaattctgattggtcaatgtgaatgtattcacttaacagttccacaaatttatttattaactccgaggcacatacatcgtcggtattttttatggcaaactttactcttccagcatccgtttctaaaaaaatattaacgagttccatttatatcatccaatattattgaaataacgttgatggacaaataatacaaataagaaggtacggtacctttgtccaccatctcctccaattcatgctctattttgtcattaactttaatgtatgaaaacagtacgccacatgcttccatgacagtgtgtaacactttggatacaaaatgtttgacattagtataattgttcaagactgtcaatctataatagatagtagctataatatattctatgatggtattgaagaagatgacaaccttggcatattgatcatttaacacagacatggtatcaacagatagcttgaatgaaagagaatcagtaattggaataagcgtcttctcgatagagtgtccgtataccaacatgtctgatattttgatgtattccattaaattatttagttttttctttttattttcgttaaacagcatttctgtcaacggaccccaacatcgttgaccgattaagttttgattgatttttccgtgtaaggcgtatctagtcagatcgtatagcctatccaataatccatcatctgtgcgtagatcacatcgtacactttttaattctttatagaagagcgacagacatctggagcaattacagacagcaatttctttattctctacagatgtaagatacttgaagacattcctatgatgatgcagaattttggataacacggtattgatggtatctgttaccataattcctttgatggctgatagtgtcagagcacaagatttccaatctttgacaatttttagcaccattatctttgttttgatatctatatcagacagcatggtgcgtctgacaacacagggattaagacggaaagatgaaatgattctctcaacatcttcaatggataccttgctattttttctggcattatctatatgtgcgagaatatcctctagagaatcagtatcctttttgatgatagtggatctcaatgacatgggacgtctaaaccttcttattctatcaccagattgcatggtgatttgtcttctttcttttatcataatgtaatctctaaattcatcggcaaattgtctatatctaaaatcataatatgagatgtttacctctacaaatatctgttcgtccaatgttagagtatctacatcagttttgtattccaaattaaacatggcaacggatttaattttatattcctctattaagtcctcgtcgataataacagaatgtagataatcatttaatccatcgtacatggttggaagatgcttgttgacaaaatctttaattgtcttgatgaaggtgggactatatctaacatcttgattaataaaatttataacattgtccataggatactttgtaactagttttatacacatctcttcatcggtaagtttagacagaatatcgtgaacaggtggtatattatattcatcagatatacgaagaacaatgtccaaatctatattgtttaatatattatatagatgtagcgtagctcctacaggaatatctttaactaagtcaatgatttcatcaaccgttagatctattttaaagttaatcatataggcattgatttttaaaaggtatgtagccttgactacattttcattaattaaccattccaagtcactgtgtgtaagaagattatattctatcataagcttgactacatttggtcccgataccattaaagaattcttatgatataaggaaacagcttttaggtactcatctactctacaagaattttggagagccttaacgatatcagtgacgtttattatttcaggaggaaaaaacctaacattgagaatgtcggagttaatagcttccagatacagtgattttggcaatagtccgtgtaatccataatccagtaacacgagctggtgcttgctagacaccttttcaatgtttaatttttttgaaataagctttgataaagccttcctcgcaaattccggatacatgaacatgtcggcgacatgattaagtattgttttttcattatttttat

SEQ ID NO: 5 - DNA, 25566 bp, Horsepox virus
attaacgagttccatttatatcatccaatattattgaaataacgttgatggacaaataatacaaataagaaggtacggtacctttgtccaccatctcctccaattcatgctctattttgtcattaactttaatgtatgaaaacagtacgccacatgcttccatgacagtgtgtaacactttggatacaaaatgtttgacattagtataattgttcaagactgtcaatctataatagatagtagctataatatattctatgatggtattgaagaagatgacaaccttggcatattgatcatttaacacagacatggtatcaacagatagcttgaatgaaagagaatcagtaattggaataagcgtcttctcgatagagtgtccgtataccaacatgtctgatattttgatgtattccattaaattatttagttttttctttttattttcgttaaacagcatttctgtcaacggaccccaacatcgttgaccgattaagttttgattgatttttccgtgtaaggcgtatctagtcagatcgtatagcctatccaataatccatcatctgtgcgtagatcacatcgtacactttttaattctttatagaagagcgacagacatctggagcaattacagacagcaatttctttattctctacagatgtaagatacttgaagacattcctatgatgatgcagaattttggataacacggtattgatggtatctgttaccataattcctttgatggctgatagtgtcagagcacaagatttccaatctttgacaatttttagcaccattatctttgttttgatatctatatcagacagcatggtgcgtctgacaacacagggattaagacggaaagatgaaatgattctctcaacatcttcaatggataccttgctattttttctggcattatctatatgtgcgagaatatcctctagagaatcagtatcctttttgatgatagtggatctcaatgacatgggacgtctaaaccttcttattctatcaccagattgcatggtgatttgtcttctttcttttatcataatgtaatctctaaattcatcggcaaattgtctatatctaaaatcataatatgagatgtttacctctacaaatatctgttcgtccaatgttagagtatctacatcagttttgtattccaaattaaacatggcaacggatttaattttatattcctctattaagtcctcgtcgataataacagaatgtagataatcatttaatccatcgtacatggttggaagatgcttgttgacaaaatctttaattgtcttgatgaaggtgggactatatctaacatcttgattaataaaatttataacattgtccataggatactttgtaactagttttatacacatctcttcatcggtaagtttagacagaatatcgtgaacaggtggtatattatattcatcagatatacgaagaacaatgtccaaatctatattgtttaatatattatatagatgtagcgtagctcctacaggaatatctttaactaagtcaatgatttcatcaaccgttagatctattttaaagttaatcatataggcattgatttttaaaaggtatgtagccttgactacattttcattaattaaccattccaagtcactgtgtgtaagaagattatattctatcataagcttgactacatttggtcccgataccattaaagaattcttatgatataaggaaacagcttttaggtactcatctactctacaagaattttggagagccttaacgatatcagtgacgtttattatttcaggaggaaaaaacctaacattgagaatgtcggagttaatagcttccagatacagtgattttggcaatagtccgtgtaatccataatccagtaacacgagctggtgcttgctagacaccttttcaatgtttaatttttttgaaataagctttgataaagccttcctcgcaaattccggatacatgaacatgtcggcgacatgattaagtattgttttttcattatttttatattttctcaacaagttctcaataccccaatagatgatagaatatcacccaatgcgtccatgttgtctatttccaacaggtcgctatatccaccaatagaagtttttccaaaaaagattctaggaacagttctaccaccagtaatttgttcaaaatagtcacgcaattcattttcgggtttaaattctttaatatcgacaatttcatacgctcctcttttgaaactaaacttatttagaatatccagtgcatttctacaaaaaggacatgtatacttgacaaaaattgtcactttgttattggccaacctttgttgtacaaattcctcggccattttaatatttaagtgatataaaactatctcgacttatttaactctttagttgagatatatggacgcagatagctatatgatagccaactacagaaggcaaacgctataaaaaacataattacgacgagcatatttataaatatttttattcagcattacttgatatagtaatattaggcacagtcaaacattcaactactttcgatacattaactttctcattttctttaacaaattctgcaatatcttcgtaaaaagattcttgaaactttttagaatatctatcgactctagatgaaatagcgttcgtcaacatactatgttttgtatacataaaggcgcctattttaacagtttctagtgacaaaatgctagcgatcctaggatcctttaaaatcacatagattgacgattcgtctctcttagtaactctagtaaaataatcatacaatctagtacgcgaaataatattatccttgacttgaggagatctaaacaatctagttttgagaacatcgataagttcatcgggaatgacatacatactatctttaatagaactcttttcatccagttgaatggattcgtccttaaccaactgattaatgagatcttctattttatcattttccagatgatacgtatgtccattaaagttaaattgtgtagcgcttctttttagtctagcagccaatactttaacatcactaatatcgatatacaaaggagatgatttatcgatggcattaagaattcgtttttcgacatctgtcaaaaccaattcctttttgcctgtatcgtccagtttgccattctttgtaaagaaattattttctactagactattaataagactgataaggattcctccataattgcacaatccaaactttttcacaaaactagactttacgagatctacaggaatgcgtacttcaggttttttagcttgtgattttttcttttgcggacattttctagtgaccaactcatctaccatttcattgattttagcagtgaaataagctttcaatgcacgggcactgatactattgaaaacgagttgatcttcaaattccgccatttaagtttaccaaacaacttttaaatacaaatatatcaatagtagtagaataagaactataaaaaaaataataattaaccaataccaaccccaacaacctgtattattagttgatgtggtagttttctcatcacttagaacagatttaacaatttctataaagtctgtcagatctgtcaaatcatctttcggagaacccatatatacaccaaatatagcggcgtacaacttatccatttatacattaaatattggcttttctttatcgctatcttcatcatattcatcatcaatatcaacaagtcccagattacgagccagatcttcttctacattttcagtcattgatacacgttcactatctccagagagtccgataacgttagccaccacttctctatcaatgattagtttcttgagcgcgaaagtaatttttgtttctgttccggatctatagaagacgataggtgtgataattgccttggccaattgtctttctcttttactgagtgattctagttcaccttctatagatctgagaatggatgattctccagccgaaacatattctaccatggctccgtttaatttgttgatgaagatggattcatccttaaatgttttctctgtaatagtttccaccgaaagactatgcaaagaatttggaatgtgttccttgtgcttaatgtttccatagacagcttctagaagttgatacaacataggactagccgcggtaacttttatttttagaaagtatccatcgcttctatcttgtttagatttatttttataaagtttagtctctccttccaacataataaaagtggaagtcatttgactagataaactatcagtaagttttatagagatagatgaacaattagcgtattgagaagcatttagtgtgacgtattcgatacattttgcattagatttactaatcgattttgcatactctataacacccgcacaagtctgtagagaatcgctagatgctgtaggtcttggtgaagtttcaactctcttcttaattaccttactcatgattaaacctaaataattgtactttgtaatataatgatatatattttcactttatctcatttgaaaataaaaatgtttttgtttaaccgctgcatgatgtacagatttcggaatcacaaaccactggtggttttattttatccttgtccaatgtgaattgaatgggagcggatgcgggtttcgtacgtagatagtacatttccgtttttagaccgagactccatccgtaaaaatgcatactcgttagtttgaaataactcggatctgctatatggatattcatagattgactttgatcgatgaaggctcccctgtctgcagccatttttatgatcgtcttttgtgaaatttcccaaatagttttataaactcgcttaatatcttctggaaggtttgtattctaagtggatccaccatctgccataatcctattcttgatctcatcatttcataattttttctcggttaaaactctaaggagatgcggattaactacttgaaattctccagacaatactctccgagtgtaaatattactggtatatggtttcaccgactcattattttccaaaatttgagcagttgatgccgtcggcataggtgccaccaataaactatttctaagaccgtatgttttgattttatcttttagaggtttccaattccaaagatctgacggtacaacattccaaagatcatattgtagaataccgttactggcgtacgatcttacatatgattcataaggtccttccttttcagctagttcacaactcgcatctaatgcaccgtaggtttcgaagatcttcttatttagatcttgtgcttccaggctatcaaatggataatttaagagaataaacgcgtccgctaatccttgaacaccaataccgataggtctatgtctcttattagagatttcagcttttggaataggataataattaatatctataattttattgagatttctgacaattactttgaccacatcctttagtttgaaaaaatcaaattgtccatctattacaaacatgtttaacgcgacagatgccagattacaaacggctacctcattagcatctgcatattgtattatttcagtgcagaggttactacacttaatggttcctaaattttgttgattactctttttgttacacgcatccttataaagaatgaacggagtaccagtttcaatctgagattctataatcgctttccagacgactcgagccttcatatagtcttgtatctcttttctctttcgtattgtatataatcgttcgaactcgtctccccaaacattgtttaatccagaacattcatccaaacacatcaacgaccactctccgtcatccttcactcgtttcataaagagatcaggaatccaaagagctataaataaatctctggttctatgtttctcgtttcctgtattctttttaaaatcgaggaacgccataatatcagaatgccacggttccaagtatatggccataactcccggtcgtttgtttcctccctgatccatgtatctagcggtgttattataaactctcaacattggaataataccgtttgatataccattagtaccggagatatagcttccactggcacgaatattactaattgataaacctattccccctgccattttagagattaatgcgcatcgttttaacgtatcatagatgccctctatactatcatccatcatgttaagtaaaaaaacatctagacatttggtgacgactagttctcgcattaaataaggtaggagaagcgtgcgtaaaccatttttcagaaagtagattgtacgtctcaatagctaagtctatattccattgatgtatttttaccgcgacacgcattaacatgtgctgaggtttttcaacgatcttgttgtttatttttaacaagtaggatttttccaaagttttaaaaccaaaatagttgtatgaaaagtttcgttcgtaaataataaccgaattgagtttatccttatatttgttaactatatccatggtgatacttgaaataatcggagaatgtttcccatttttaggattaacatagttgaataaatccttcatcacttcactaaatagttttttgtttccttgtgtagatttgatacggctattctggcggctagaatggcataatccggatgttgtgtagtacaagtggctgctatttcggctaccagagtgttcaattctaccgttgttactccattatatattccttgaataaccttcatagctattttaataggatctatatgatccgtgtttaagccataacataattttctaatacgagacgtaattttatcaaacatgacattttccttgtatccatttcgtttaatgacaaacatttttgttggtgtaataaaaaaaattatttaacttttcattaatagggatttgacgtacgtagcgtacaaaatgattgttcctggtatatagataaagagtcctatatatttgaaaatcgttacggctcgattaaactttaatgattgcattgtgaatatatcattaggatttaactccttgactatcagggcggcaccagaaatcaccatcaaaagcattaatacagttatgcctatcgcagttagaacggttatagcatccaccatttatatctaaaaattagatcaaagaatatgtgacaaagtcctagttgtatattgagaattgacgaaacaatgtttcttacatattttttttttattagtaaccgacttaatagtaggaactggaaaactagacttgattattctataagtatagatacccttccagataatgttctctttgataaaagttccagaaaatgtagaattttttaaaaagttatcttttgctattaccaagattgtgtttagacgcttattattaatatgagtaatgaaatccacaccgcctctagatatcgcctttatttccacattagatggtaaatccaatagtgaaactatctttttaggaatgtatggactcgcgtttagaggagtgaacgtcttgggcgtcggaaaggatgattcgtcaaacgaataaacaatttcacaaatggatgttaatgtattagtaggaaatttcttgacgctattggagttgaagattctaatggatgatgttctacctatttcatccgataacatgttaatttccgacaccaacggttttaatatttcgatgatatacggtagtctctctttcggacttatatagcttattccacaatacgagtcattatatactccaaaaaacaaaataactagtataaaatctgtatcgaatgggaaaaacgaaattatcgacataggtatagaatctggaacattgaacgtattaatacttaattctttttctgtggtaagtaccgataggttattgacattgtatggttttaaatattctataacttgagacttgatagatattagtgatgaattgaaaattatttttatcaccacgtgtgtttcaggatcgtcgtcgacgcccgtcaaccaaccgaacggagtaaaataaatatcattaatatatgctctaaatattagtatttttattaatcctttgattatcatcttctcgtacgcgaatgattccatgatcaagagtgatttgagaacatcctccggagtattaatgggcttagtaaacagtacatcgttgcaataataaaagttatccaagttaaaggatattatgcattcgtttaaagatatcacctcatctgacggagacaattttttggtaggttttagagactttgaagctacttgtttaacaaagttattcatcgtcgtttactattctatttaattttgtagttaatttatcacatatcacattaattgactttttggtccacttttccatacgtttatattcttttaatcctgcgttatccgtttccgttatatccagtgatagatcgtgcaagttaaatagaatgctcttaaataatgtcattttcttatccgctaaaaatttaaagaatgtataaacctttttcagagatttgaaactcttaggtggtgtcctagtacacaatatcataaacaaactaataaacattccacattcagattccaacagctgattaacttctacattaatacagcctattttcgctccaaatgtacattcgaaaaatctgaataaaacatcaatgtcgcaatttgtattatccaatacagaatgtttgtgattcgtgttaaaaccatcggagaaggaatagaaataaaaattattatagtggtggaattcagttggaatattgcctccggagtcataaaaggatactaaacattgttttttatcataaattacacatttccaatgagacaaataacaaaatccaaacattacaaatctagaggtagaacttttaattttgtctttaagtatatacgataagatatgtttattcataaacgcgtcaaatttttcatgaatcgctaaggagtttaagaatctcatgtcaaattgtcctatataatccacttcggatccataagcaaactgagagactaagttcttaatacttcgattgctcatccaggctcctctctcaggctctattttcatcttgacgacctttggattttcaccagtatgtattcctttacgtgataaatcatcgattttcaaatccatttgtgagaagtctatcgccttagatactttttcccgtagtcgaggtttaaaaaaatacgctaacggtatactagtaggtaactcaaaaacatcatatatagaatggtaacgcgtctttaactcgtcggttaactctttcttttgatcgagttcgtcgctactattgggtctgctcaggtgccccaactctactagttccaacatcataccgataggaatacaagacactttgccagcggttgtagatttatcatatttttccactacatatccgttacaatttgttaaaaatttagatacatctatattgctacataatccagctagtgaatatatatgacataataaattggtaaatcctagttctggtattttactaattactaaatctgtatatctttccatttatcatggaaaagaatttaccagatatcttcttttttccaaactgcgttaatgtattctcttacaaatattcacaagatgaattcagtaatatgagtaaaacggaacgtgatagtttctcattggccgtgtttccagttataaaacatagatggcataacgcacacgttgtaaaacataaaggaatatacaaagttagtacagaagcacgtggaaaaaaagtatctcctccatcactaggaaaacccgcacacataaacctaaccacgaaacaatatatatacagtgaacacacaataagctttgaatgttatagttttctaaaatgtataacaaatacagaaatcaattcgtttgatgagtatatattaagaggactattagaagctggtaatagtttacagatattttccaattccgtaggtaaacgaacagatactataggtgtactagggaataagtatccatttagcaaaattccattggcctcattaactcctaaagcacaacgagagatatttttagcgtggatttctcatagacctgtagttttaactggaggaaccggagtgggtaagacgtcacaggtacccaagttattgctttggtttaattatttatttggtggattctttactctagataaaatcactaactttcacgaaagaccagtcattctatctcttcctaggatagctttagttagattgcatagcaataccattttaaaatcattgggatttaaggtactagatggatctcctatttctttacggtacggatctataccggaagaattaataaacaaacaaccaaaaaaatatggaattgtattttctacccataagttatctctaacaaaactatttagttatggcactcttattatagacgaagttcatgagcatgatcaaataggagatattattatagcagtagcgagaaagcatcatacgaaaatagattctatgtttttaatgactgccacattagaggatgaccgagaacggctaaaagtatttttacctaatcccgcatttatacatattcctggaaatacactgtttaaaattagcgaggtatttattcataataagataaatccatcttccagaatggcatacatagaagaagaaaagagaaatttagttactgctatacagatgtatactcctcctgatggatcatccggtatagtctttgtggcatccgttgcacagtgtcacgaatataaatcatatttagaaaaaagattaccgtatgatatgtatattattcatggtaaggtcttagatatagacgaaatattagaaaaagtgtattcatcacctaatgtatcgataattatttctactccttatttggaatccagcgttactatacgcaatgttacacacatttatgatatgggtagagtttttgttcccgctccttttggaggatcgcaagaatttatttctaaatctatgagagatcaacgaaaaggaagagtaggaagagttaatcctgggacatacgtatatttctatgatctgtcttatatgaagtctatacagcgaatagattcagaatttctacataattatatattgtacgctaataagtttaatctaacactccccgaagatttgtttataatccctacaaatttggatattctatggcgcacaaaggaatatatagactcgttcgatattagtacagaaacatggaataaattattatccaattattatatgaagatgatagagtatgctaaactttatgtactaagtcctattctcgctgaggagttggataattttgagaggacgggagaattaactagtattgtacaagaagccattttatctctaaatttacgaattaagattttaaattttaaacataaagatgatgatacgtatatacacttttgtaaaatattattcggtgtctataacggaacaaacgctactatatattatcatagacctctaacgggatatatgaatatgatttcagatactatatttgttcctgtagataataactaaaaattaaactctaatgaccacatctttttttaaagatgaaaaattttctacatctccttttgtagacacaactaaacattttgcagaaaaaagtttattattgtttagataatcgtatacttcatcagtgtagatagtaaatgtgaacaaataaaaggtattcttactcaatagattggtaaattccatagaatatattagtcctttcttcttgagatcccacatcatttcaaccagagacgttttatccaatgatttacctcgtactataccacatacaaaactagattttgcagtgacgttgtacctggtattcctaccaaacaaaattttacttttagttcttttagaaaattctaaggtagaatctctatttgccaatatgtcatctatggaattaccactagcaaaaaatgatagaaatatatattgatacatcgcagctggttttgatctactatactttaaaaacgaatcagattccataattgcctgtatatcatcagctgaaaaactatgttttacacgtattccttcggcatttctttttaatgatatatcttgtttagacaatgataaagttatcatgtccatgagagacgcgtctccgtatcgtataaatatttcattagatgttagacgcttcattaggggtatacttctataaggtttcttaattagtccatcatttgttgcgtcaagaactactatcggatgttgttgggtatctctagtgttacacatggccttactaaagtttgggtaaataactatgatatctctattaattatagatgcatatatttcatttgtcaaggatattagtatcgacttgctatcgtcattaatacgtgtaatgtaatcatataaatcatgcgatagccaaggaaaatttaaatagatgttcatcatataatcgtcgctataattcatattaatacgttgacattgactaatttgtaatatagcctcgccacgaagaaagctctcgtattcagtttcatcgataaaggataccgttaaatataactggttgccgatagtctcatagtctattaagtggtaagtttcgtacaaatacagaatccctaaaatattatctaatgttggattaatctttaccataactgtataaaatggagacggagtcataactattttaccgtttgtacttactggaatagacgaaggaataatctccggacatgctggtaaagacccaaatgtctgtttgaagaaatccaatgttccaggtcctaatctcttaacaaaaattacaatattcgatcccgatatcctttgcattctatttaccagcatatcacgaactatattaagattatctatcatgtctattctcccaccgttatataaatcgcctccgctaagaaacgttagtatatccatacaatggaatacttcatttctaaaatagtattcgttttctaattctttaatgtgaaatcgtatactagaaagggaaaaattatctttgagttttccgttagaaaaaaaccacgaaactaatgttctgattgcgtccgattccgttgctgaattaatggatttacaccaaaaactcatataacttctagatgtagaagcattcgctaaaaaattagtagaatcaaaggatataagtagatgttccaacaagtgagcaattcccaagatttcatctatatcattttcgaatccgaaattagaaattcccaagtagatatcctttttcatccgatcattgatgaaaatacgaactttattcggtaagacaatcatttactaaggagtaaaataggaagtaatgttcgtatgtcgttatcatcgtataaattaaaggtgtgttttttaccattaagtgacattataattttaccaatattggaattataatataggtgtatttgcgcactcgcgacggttgatgcatcggtaaatatagctgtatctaatgttctagtcggtatttcatcatttcgctgtctaataatagcgttttctctatctgtttccattacagctgcctgaagtttattggtcggataatatgtaaaataataagaaatacatacgaataacaaaaataaaataagatataataaagatgccatttagagatctaattttgtttaacttgtccaaattcctacttacagaagataaggaatcgttggagttagtgtcttccttatgtaggggatttgaaatatcttataatgacttaataacttactttccagataggaaataccataaatatatttctaaagtatttgaacatgtagatttatcggaggaattaagtatggaattccatgatacaactttgcgagatttagtttatcttagattgtacaagtattccaagtgtatacggccgtgttataaattaggagataatctaaaaggcatagttgttataaaggacagaaatatatatattagagaagcaaatgatgacttgatagaatatctcctcaaggaatacactcctcagatttatacatattctaatgagcgagttcccatagctggttcaaaattaattctttgtggattttctcaagttacatttatggcgtatacaacgtctcatataacaacaaataaaaaggtagatgttctcgtttccaaaaaatgtatagatgaactagtcgatccaataaattatcaaatacttcaaaatttatttgataaaggaagcggaacaataaacaaaatactcaggaagatattttattcggtaaccggtggccaaactccataatttgctttttctatttcggattttagaatttccaaattcaccagcgatttatctgttttggtgaaatccaaggatttattaatgtccacaaatgccatttgttttgtctgtggattgtatttgaaaatggaaacgatgtagttagatagatgcgctgcgaagtttcctattagggttccgcgcttcacgtcacccagcatacttgaatcaccatcctttaaaaaaaatgataagatatcaacatggagtatatcatactcggattttaattcttctactgactcactgacattttcacaaatactacaatacggtttaccgaaaataatcaatacgttcttcatttatgggtatcaaaaacttaaaatcgttactgctggaaaataaatcactgacgatattagatgataatttatacaaagtatacaatggaatatttgtggatacaatgagtatttatatagccgtcgccaattgtgtcagaaacttagaagagttaactacggtattcataaaatacgtaaacggatgggtaaaaaagggagggcatgtaaccctttttatcgatagaggaagtataaaaattaaacaagacgttagagacaagagacgtaaatattctaaattaaccaaggacagaaaaatgttagaattagaaaagtgtacatccgaaatacaaaatgttaccggatttatggaagaagaaataaaggcagaaatgcaattaaaaatcgataaacttacatttcaaatatatttatctgattctgataacataaaaatatcattgaatgagatactaacacatttcaacaataatgagaatgttacattattttattgtgatgaacgagacgcagaattcgttatgtgtctcgaggctaaaacacatttctctaccacaggagaatggccgttgataataagtaccgatcaggatactatgctatttgcatctgctgataatcatcctaagatgataaaaaacttaactcaactgtttaaatatgttccatctgcagaggataactatttagcaaaattaacggcgttagtgaatggatgtgatttctttcctggactctatggggcatctataacacccaccaacttaaacaaaatacaattgtttagtgattttacaatcgataatatagtcactagtttggcaattaaaaattattatagaaagactaactctaccgtagacgtgcgtaatattgttacgtttataaacgattacgctaatttagacgatgtctactcgtatattcctccttgtcaatgcactgttcaagaatttatattttccgcattagatgaaaaatggaacaattttaaatcatcttatttagagaccgttccgttaccctgtcaattaatgtacgcgttagaaccacgtaaggagattgatgtttcagaagttaaaactttatcatcttatatagatttcgaaaatactaaatcagatatcgatgttataaaatctatatcctcgatcttcggatattctaacgaaaactgtaacacgatagtattcggcatctataaggataatttactactgagtataaataattcattttactttaacgatagtctgttaataaccaatactaaaagtgataatataataaatataggttactagattaaaaatggtgttccaactcgtgtgctctacatgcggtaaagatatttctcacgaacgatataaattgattatacgaaaaaaatcattaaaggatgtactcgtcagtgtaaagaacgaatgttgtaggttaaaattatctacacaaatagaacctcaacgtaacttaacagtgcaacctctattggatataaactaatatggatccggttaattttatcaagacatatgcgcctagaggttctattatttttattaattataccatgtcattaacaagtcatttgaatccatcgatagaaaaacatgtgggtatttattatggtacgttattatcggaacacttggtagttgaatcaacatatagaaaaggagttcgaatagtcccattggatagtttttttgaaggatatcttagtgcaaaagtatacatgttagagaatattcaagttatgaaaatagcagctaatacgtcgttaactttactaggtattccatatggatttggtcatgatagaatgtattgttttaaattggtagctgactgttataaaaatgccggtgttgaaacatcgtctaaacgaatattaggtaaagatatttttctgagccaaaacttcacagacgataatagatggataaagatatatgattctaataatttaacattttggcaaattgattaccttaaagggtgagttaatatgcataactactcctccgttgttttttccctcgttctttttcttaacgttgtttgccatcactctcataatgtaaagatattctaaaatggtaaacttttgcatatcggacgcagaaattggtataaatgttgtaattgtattatttcccgtcaatggactagtcacagctccatcagttttatatcctttagagtatttctcactcgtgtctaacattctagagcattccatgatctgtttatcgttgatattggccggaaagatagattttttattttttattatattactattggcaattgtagatataacttctggtaaatatttttctaccttttcaatctcttctattttcaagccggctatatattctgctatattgttgctagtatcaataccttttctggctaagaagtcatatgtggtattcactatatcagttttaactggtagttccattagcctttccacttctgcagaataatcagaaattggttctttaccagaaaatccagctactataataggctcaccgatgatcattggcaaaatcctatattgtaccagattaatgagagcatatttcatttccaataattctgctagttcttgagacattgatttatttgatgaatctagttggttctctagatactctaccatttctgccgcatacaataacttgttagataaaatcagggttatcaaagtgtttagcgtggctagaatagtgggcttgcatgtattaaagaatgcggtagtatgagtaaaccgttttaacgaattatatagtctccagaaatctgtggcgttacatacatgagccgaatgacatcgaagattgtccaatatttttaatagctgctctttgtccattatttctatatttgactcgcaacaattgtaaataccattaatcactgattcctttttcgatgccggacaatagcacaattgtttagctttggactctatgtattcagaattaatagatatatctcttaatacagattgcactatacattttgaaactatgtcaaaaattgtagaacgacgctgttctgcagccatttaactttaaataatttacaaaaatttaaaatgagcatccgtataaaaatcgataaactgcgccaaattgtggcatatttttcagagttcagtgaagaagtgtctataaatgtagactcgacggatgagttaatgtatatttttgccgccttgggtggatctgtaaacatttgggccattatacctctcagtgcatcagtgttctaccgcggagccgaaaatattgtgtttaatcttccggtgtccaaggtaaaatcgtgtttgtgtagttttcacaatgatgccatcatagatatagaacctaatctggaaaataatctagtaaaactttctagttatcatgtagtaagtgtcgattgtaacaaggaactgatgcctattaggacagatactactatttgtctaagtatagatcaaaagaaatcttacgtgtttaattttcacaagtatgaagaaaaatgttgtggtagaaccgtcattcatttagaatggttgttgggctttatcaagtgtattagtcagcatcagcatttggctattatgtttaaagatgacaatattattatgaagactcctggtaatactgatgcgttttccagggaatattctatgactgaatgttctcaagaactacaaaagttttctttcaaaatagctatctcgtctctcaacaaactacgaggattcaaaaagagagtcaatgtttttgaaactagaatcgtaatggataatgacgataacattttaggaatgttgttttcggatagagttcaatcctttaagatcaacatctttatggcgtttttagattaatactttcaatgagataaatatgggtggcggagtaagtgttgagctccctaaacgggatccgcctccgggagtacccactaatgagatgttattaaacgttgataaaatgcatgacgtgatagctcccgctaagcttttagaatatgtgcatataggaccactagcaaaagataaagaggataaagtaaagaaaagatatccagagtttagattagttaacacaggacccggtggtctttcagcattattaagacaatcgtataatggaaccgcacccaattgctgtcgcacttttaatcgtactcattattggaaaaaggatggaaagatatcagataagtatgaagagggtgcaatattagaatcgtgttggccagacgttcacgacaccggaaaatgcgatgttgatttattcgactggtgtcagggggatacgttcgatagaaacatatgccatcagtggatcggttcagcctttaataggagtaatagaactgtagagggtcaacaatcgttaataaatctgtataataagatgcaaacattatgtagtaaagatgctagtgtaccaatatgcgaatcatttttgcattatttacgcgcacacaatacagaagatagcaaagagatgatcgattatattctaagacaacagtctgcggactttaaacagaaatatatgagatgtagttatcccactagagataagttagaagagtcattaaaatatgcggaacctcgagaatgttgggatccagagtgttcgaatgccaatgttaatttcttactaacacgtaattataataatttaggactttgcaatattgtacgatgtaataccagcgtgaacaacttacagatggataaaacttcctcattaagattgtcatgtggattaagcaatagtgatagattttctactgttcccgtcaatagagcaaaagtagttcaacataatattaaacactcgttcgacctaaaattgcatttgatcagtttattatctctcttggtaatatggatactaattgtagctatttaaatgggtgccgcagcaagcatacagacgacggtgaatacactcagcgaacgtatctcgtctaaattagaacaagaagcgaatgctagtgctcaaacaaaatgtgatatagaaatcggaaatttttatatccgacaaaaccatggatgtaacctcactgttaaaaatatgtgctctgcggacgcggatgctcagttggatgctgtgttatcagccgctacagaaacatatagtggattaacaccggaacaaaaagcatacgtaccagctatgtttactgctgcgttaaacattcagacaagtgtaaacactgttgttagagattttgaaaattatgtgaaacagacttgtaattctagcgcggtcgtcgataacaaattaaagatacaaaacgtaatcatagatgaatgttacggagccccaggatctccaacaaatttggaatttattaatacaggatctagcaaaggaaattgtgccattaaggcgttgatgcaattgactactaaggccactactcaaatagcacctaaacaagttgctggtacaggagttcagttttatatgattgttatcggtgttataatattggcagcgttgtttatgtactatgccaagcgtatgctgttcacatccaccaatgataaaatcaaacttattttagccaataaggaaaacgtccattggactacttacatggacacattctttagaacttctccgatggttattgctaccacggatatgcaaaactgaaaatatattgataatattttaatagattaacatggaagttatcgctgatcgtctagacgatatagtgaaacaaaatatagcggatgaaaaatttgtagattttgttatacacggtctagagcatcaatgtcctgctatacttcgaccattaattaggttgtttattgatatactattatttgttatagtaatttatatttttacggtacgtctagtaagtagaaattatcaaatgttgttggtgttggtggcgctagtcatcacattaactattttttattactttatactataatagtactagactgacttctaacaaacatctcacctgccataaataaatgcttgatattaaagtcttctatttctaacactattccatctgtggaaaataatactctgacattatcgctaattgacacatcggtgagtgatatgcctataaagtaataatcttctttgggcacatataccagtgtaccaggttctaacaacctatttactggtgctcctgtagcatactttttctttaccttgagaatatccatcgtttgcttggtcaatagcgatatgtgattttttatcaaccactcaaaaaagtaattggagtgttcatatcctctacgggctattgtctcatggccgtgtatgaaatttaagtaacacgactgtggtagatttgttctatagagccgattgccgcaaatagatagaactaccaatatgtctgtacaaatgttaaacattaattgattaacagaaaaaacaatgttcgttctgggaatagaaaccagattaaaacaaaattcgttagaatatatgccacgtttatacatggaatataaaataactacagtttgaaaaataacagtatcatttaaacatttaacttgaggggttaatttcacaactttactgtttttgaactgttcaaaatatagcatcgatccatgagaaatacgtttagccgcctttaatagaggaaatcctaccgcctttctggatctcaccaacgacgatagttctgaccagcaacttatttcttcatcatccacctgttttaacatataataggcaggagatagatatccgtcattgcaatattccttttcgtaggcacacaatctaatattgataaaatctccattctcttctctgcatttattatcttgtttcggtggctgattaggctgtagtcttggtttaggctttggtatatcgttgttgaatctattttggtcattaaatctttcatttcttcctggtatatttttatcacctcgtttggttggatttttgtctatattatcgtttgtaacatcggtacgggtattcatttatcacaaaaaaaacttctctaaatgagtctactgctagaaaaccttatcgaagaagataccatattttttgcaggaagtatatctgagtatgatgatttacaaatggttattgccggcgcaaaatccaaatttccaagatctatgctttctatttttaatatagtacctagaacgatgtcaaaatatgagttagagttgattcataacgaaaatatcacaggagcaatgtttaccacaatgtataatataagaaacaatttgggtctaggagatgataaactaactattgaagccattgaaaactatttcttggatcctaacaatgaagttatgcctcttattattaataatacggatatgactgccgttattcctaaaaaaagtggtaggagaaagaataaaaacatggttatcttccgtcaaggatcatcacctatcttgtgcattttcgaaactcgtaaaaagattaatatttataaagaaaatatggaatccgcatcaactgagtatacacctatcggagacaacaaggctttgatatctaaatatgcgggaattaatatcctgaatgtgtattctccttccacatccataagattgaatgccatttacggattcaccaataaaaataaactagagaaacttagtactaataaggaactagaatcgtatagttctagccctcttcaagaacccattaggttaaatgattttctgggactattggaatgtattaaaaagaatattcctctaacagatattccgacaaaggattgattactataaatggagaatgttcctaatgtatactttaatcctgtgtttatagagcccacgtttaaacattctttattaagtgtttataaacacagattaatagttttatttgaagtattcattgtattcattctaatatatgtattttttagatctgaattaaatatgttcttcatgcctaaacgaaaaatacccgatcctattgatagattacgacgtgctaatctagcgtgtgaagacgataagttaatgatctatggattaccatggatgacaactcaaacatctgcgttatcaataaatagtaaaccgatagtgtataaagattgtgcaaagcttttgcgatcaataaatggatcacaaccagtatctcttaacgatgttcttcgcagatgatgattcattttttaagtatttggctagtcaagatgatgaatcttcattatctgatatattgcaaatcactcaatatctagactttctgttattattattgatccaatcaaaaaataaattagaagccgtgggtcattgttatgaatctctttcagaggaatacagacaattgacaaaattcacagactttcaagattttaaaaaactgtttaacaaggtccctattgttacagatggaagggtcaaacttaataaaggatatttgttcgactttgtgattagtttgatgcgattcaaaaaagaatcctctctagctaccaccgcaatagatcctattagatacatagatcctcgtcgtgatatcgcattttctaacgtgatggatatattaaagttgaataaagtgaacaataattaattctttattgtcatcatgaacggcggacatattcagttgataatcggccccatgttttcaggtaaaagtacagaattaattagacgagttagacgttatcaaatagctcaatataaatgcgtgactataaaatattctaacgataatagatacggaacgggactatggacgcatgataagaataattttgaagcattggaagcaactaaactatgcgatgttttggaattaattacagatttctccgtgataggtatcgatgaaggacagttctttccagacattgttgaattctgtgagcgtatggcaaacgaagaaaaaatagttatagtagccgcactcgatgggacatttcaacgtaaaccgtttaataatattttgaatcttattccattatctgaaatggtggtaaaactaactgctgtgtgtatgaaatgctttaaggaggcttccttttctaaacgattgggtgaggaaaccgagatagagataataggaggtaatgatatgtatcaatcggtgtgtagaaagtgttacgtcggctcataatattatattttttatctaaaaaactaaaaataaacattgattaaattttaatataatacttaaaaatggatgttgtgtcgttagataaaccgtttatgtattttgaggaaattgataatgagttagattacgaaccagaaagtgcaaatgaggtcgcaaaaaaactaccgtatcaaggacagttaaaactattactaggagaattattttttcttagtaagttacagcgacacggtatattagatggtgccaccgtagtgtatataggatcggctcctggtacacatatacgttatttgagagatcatttctataatttaggaatgattatcaaatggatgctaattgacggacgccatcatgatcctattctaaatggattgcgtgatgtgactctagtgactcggttcgttgatgaggaatatctacgatccatcaaaaaacaactgcatccttctaagattattttaatttctgatgtaagatccaaacgaggaggaaatgaacctagtacggcggatttactaagtaattacgctctacaaaatgtcatgattagtattttaaaccccgtggcatctagtcttaaatggagatgcccgtttccagatcaatggatcaaggacttttatatcccacacggtaataaaatgttacaaccttttgctccttcatattcagctgaaatgagattattaagtatttataccggtgagaacatgagactgactcgagttaccaaattagacgctgtaaattatgaaaaaaagatgtactaccttaataagatcgtccgtaacaaagtagttgttaactttgattatcctaatcaggaatatgactattttcacatgtactttatgctgaggaccgtatactgcaataaaacatttcctactactaaagcaaaggtactatttctacaacaatctatatttcgtttcttaaatattccaacaacatcaactgaaaaagttagtcatgaaccaatacaacgtaaagtatctagcaaagattttatgtctaaaaacagaaatagcaagagatccgtacgcagtaataaatagaaacgtactactgagatatactaccgatatagagtataatgatttagttactttaataaccgttagacataaaattgattctatgaaaactgtgtttcaggtatttaacgaatcatccataaattatactccggttgatgatgattatggagaaccaatcattataacatcgtatcttcaaaaaggtcataacaagtttcctgtaaattttctatacatagatgtggtaatatctgacttatttcctagctttgttagactagatactacagaaactaatatagttaatagtgtactacaaacaggtgatggtaaaaagactcttcgtcttcccaaaatgttagagacggaaatagttgtcaagattctctatcgccctaatataccattaaaaattgttagatttttccgcaataacatggtaactggagtagagatagccgatagatctgttatttcagtcgctgattaatcaattagtagagatgagataagaacattataataatcaataatatatcttatatcttatatcttatatcttatatcttatatcttatatcttatatcttatatcttatatct

SEQ ID NO: 6 - DNA, 28662 bp, Horsepox virus
atggatgttgtgtcgttagataaaccgtttatgtattttgaggaaattgataatgagttagattacgaaccagaaagtgcaaatgaggtcgcaaaaaaactaccgtatcaaggacagttaaaactattactaggagaattattttttcttagtaagttacagcgacacggtatattagatggtgccaccgtagtgtatataggatcggctcctggtacacatatacgttatttgagagatcatttctataatttaggaatgattatcaaatggatgctaattgacggacgccatcatgatcctattctaaatggattgcgtgatgtgactctagtgactcggttcgttgatgaggaatatctacgatccatcaaaaaacaactgcatccttctaagattattttaatttctgatgtaagatccaaacgaggaggaaatgaacctagtacggcggatttactaagtaattacgctctacaaaatgtcatgattagtattttaaaccccgtggcatctagtcttaaatggagatgcccgtttccagatcaatggatcaaggacttttatatcccacacggtaataaaatgttacaaccttttgctccttcatattcagctgaaatgagattattaagtatttataccggtgagaacatgagactgactcgagttaccaaattagacgctgtaaattatgaaaaaaagatgtactaccttaataagatcgtccgtaacaaagtagttgttaactttgattatcctaatcaggaatatgactattttcacatgtactttatgctgaggaccgtatactgcaataaaacatttcctactactaaagcaaaggtactatttctacaacaatctatatttcgtttcttaaatattccaacaacatcaactgaaaaagttagtcatgaaccaatacaacgtaaagtatctagcaaagattttatgtctaaaaacagaaatagcaagagatccgtacgcagtaataaatagaaacgtactactgagatatactaccgatatagagtataatgatttagttactttaataaccgttagacataaaattgattctatgaaaactgtgtttcaggtatttaacgaatcatccataaattatactccggttgatgatgattatggagaaccaatcattataacatcgtatcttcaaaaaggtcataacaagtttcctgtaaattttctatacatagatgtggtaatatctgacttatttcctagctttgttagactagatactacagaaactaatatagttaatagtgtactacaaacaggtgatggtaaaaagactcttcgtcttcccaaaatgttagagacggaaatagttgtcaagattctctatcgccctaatataccattaaaaattgttagatttttccgcaataacatggtaactggagtagagatagccgatagatctgttatttcagtcgctgattaatcaattagtagagatgagataagaacattataataatcaataatatatcttatatcttatatcttatatcttatatcttatatcttatatcttatatcttatatcttatatcttatatcttgtttagaaaaatgctaatattaaaatagctaacgctagtaatccaatcggaagccatttgatatctataatagggtatctaatttcctgatttaaatagcggacagctatattctcggtagctactcgtttggaatcacaaacattatttacatctaatttactatctgtaatggaaacgtttcccaatgaaatggtacaatccgatacattgcatcttgttatatttttttttaaagaggctggtaacaacgcatcgcttcgtttacatggctcgtaccaacaataatagggtaatcttgtatctattcctatccgtactatgcttttatcaggataaatacatttacatcgtatatcgtctttgttagcatcacagaatgcataaatttgttcgtccgtcatgataaaaatttaaagtgtaaatataactattatttttatagttgtaataaaaagggaaatttgattgtataccttcggttctttaaaagaaactgacttgataaaaatggctgtaatctctaaggttacgtatagtctatatgatcaaaaagagattaatgctacagatattatcattagtcatgttaaaaatgacgacgatatcggtaccgttaaagatggtagactaggtgctatggatggggcattatgtaaaacttgtgggaaaacggaattggaatgtttcggtcactggggtaaagtaagtatttataaaactcatatagttaagcctgaatttatttcagaaattattcgtttactgaattatatatgtattcactgcggattattgcgttcacgagaaccgtattccgacgatattaacctaaaagagttatcgggacacgctcttaggagattaaaggataaaatattatccaagaaaaagtcatgttggaacagtgaatgtatgcaaccgtatcaaaaaattactttttcaaagaaaaaggtttgtttcgtcaacaagttggatgatattaacgttcctaattctctcatctatcaaaagttaatttctattcatgaaaagttttggccattattagaaattcatcaatatccagctaacttattttatacagactactttcccatccctccgttgattattagaccggctattagtttttggatagatagtatacccaaagaaaccaatgaattaacttacttattaggtatgatcgttaagaattgtaacttgaatgctgatgaacaggttatccagaaggcggtaatagaatacgatgatattaaaattatttctaataacactaccagtatcaatttatcatatattacatccggcaaaaataatatgattagaagttatatcgtcgcccgacgaaaagatcagacggctagatctgtaattggtcccagtacatctatcaccgttaatgaggtaggaatgcccgcatatattagaaatacacttacagaaaagatatttgttaatgcctttacagtggataaagttaaacaactattagcgtcaaaccaagttaaattttactttaataaacgattaaaccaattaacaagaatacgccaaggaaagtttattaaaaataaaatacatttattgcctggtgattgggtagaagtagctgttcaagaatatacaagtattatttttggaagacagccgtctctacatagatacaacgtcatcgcttcatctatcagagctaccgaaggagatactatcaaaatatctcccggaattgccaactctcaaaatgctgattttgacggggatgaggaatggatgatattagaacaaaatcctaaagctgtaattgaacaaagtattcttatgtatccgacaacgttactcaaacacgatattcatggagcccctgtttatggatctattcaagatgaaatcgtagcagcgtattcattgtttaggatacaagatctttgtttagatgaagtattaaacatcttggggaaatatggaagaaagttcgatcctaaaggtaaatgtaaattcagcggtaaagatatctatacttacttgataggtgaaaagattaattatccgggtctcttaaaggatggtgagattattgcaaacgacgtagatagtaattttgttgtggctatgaggcatctgtcattggctggactcttatccgatcataagtcgaacgtggaaggtatcaactttattatcaagtcatcttatgtttttaagagatatctatctatttacggttttggggtgacattcaaagatctgagaccaaattcgacgttcactaataaattggaggccatcaacgtagaaaaaatagaacttatcaaagaagcatacgccaaatatctcaaagatgtaagagacgggaaaatagttccattatctaaagctttagaagcggactacgtggaatccatgttatccaacttgacaaattttaatatcagagagatagaagaacatatgagacaaacgctgatagatgatccagataataacctcctgaaaatggccaaagcgggttataaagtaaatcctacagaactaatgtatattctaggtacgtatggacaacagaggattgatggtgaaccagcagagactcgagtattgggtagagttttaccttactatcttccagactctaaggatccagaaggaagaggttatattcttaattctttaacaaaaggattaacaggttctcaatattacttttcgatgctggttgcaagatctcaatctactgatatcgtctgtgaaacatcacgtaccggaacactggctagaaaaatcattaaaaagatggaggatatggtggtcgacggatacggacaagtagttataggtaatacgctcatcaagtacgccgccaattataccaaaattctaggctcagtatgtaaacctgtagatcttatctatccagatgagtccatgacttggtatttggaaattagtgctctgtggaataaaataaaacagggattcgtttactctcagaaacagaaacttgcaaaaaagacattggcgccgtttaatttcctagtattcgtcaaacccaccactgaggataatgctattaaggttaaggatctgtacgatatgattcataacgtcattgatgatgtgaaagagaaatacttctttacggtatctaatatagattttatggagtatatattcttgacgcatcttaatccttctagaattagaattacaaaagaaacggctatcactatctttgaaaagttctatgaaaaactcaattatactctaggtggtggaactcctattggaattatttctgcacaggtattgtctgagaagtttacacaacaagccctgtccagttttcacactactgaaaaaagtggtgccgtcaaacaaaaacttggtttcaacgagtttaataacttgactaatttgagtaagaataagaccgaaattatcactctggtatccgatgatatctctaaacttcaatctgttaagattaatttcgaatttgtatgtttgggagaattaaatccaaacatcactcttcgaaaagaaacagataaatatgtagtagatataatagttaatagattatacatcaagagagcagaaataaccgaattagtcgtcgaatatatgattgaacgatttatctcctttagcgtcattgtaaaggaatggggtatggagacattcattgaggacgaggataatattagatttactgtctatctaaatttcgttgaaccagaggaattgaatcttagtaagtttatgatggttcttccgggggcagccaacaagggaaagattagtaaattcaagattcctatctctgactatacgggatatgacgacttcaatcaaacaaaaaagctcaataagatgactgtagaactcatgaatctaaaagaattgggttctttcgatttggagaacgtcaacgtgtatcctggagtatggaatacatacgatatcttcggtatcgaggccgctcgtgaatacttgtgcgaagccatgttaaacacctatggagaagggttcgattatctgtatcagccttgtgatcttctcgctagtttactatgtgctagttacgaaccagaatcagttaataaattcaagttcggtgcagctagtactcttaagagagctacgttcggagacaataaagcattgttaaacgcggctcttcataaaaagtcagaacctattaacgataatagtagctgccacttttttagcaaggtccctaatataggaactggatattacaaatactttatcgacttgggtcttctcatgagaatggaaaggaaactatctgataagatatcttctcaaaagatcaaggaaatggaagaaacagaagacttttaattcttatcaataacatatttttctatgatctgtcttttaaacgatggattttccacaaatgcgcctctcaagtccctcatagaatgatacacgtataaaaaatatagcataggcaatgactccttatttttagacattagatatgccaaaatcatagccccgcttctatttactcccgcagcacaatgaaccaacacgggctcgtttcgttgatcacatttagataaaaaggcggttacgtcgtcaaaatatttactaatatcggtagttgtatcatctaccaacggtatatgaataatattaatattagagttaggtaatgtatatttatccatcgtcaaatttaaaacatatttgaacttaacttcagatgatggtgcatccatagcatttttataatttcccaaatacacattattggttactcttgtcattatagtgggagatttggctttgtgcatatctccagttgaacgtagtagtaagtatttatacaaacttttcttatccatttataacgtacaaatggataaaactactttatcagtaaacgcatgtaatttagaatacgttagagaaaaggctatagtaggcgtacaagcagccaaaacatcaacacttatattctttgttattatattggcaattagtgcgctattactctggtttcagacgtctgataatccagtctttaatgaattaacgagatatatgcgaattaaaaatacggttaacgattggaaatcattaacggatagcaaaacaaaattagaaagtgatagaggtagacttctagccgctggtaaggatgatatattcgaattcaaatgtgtggatttcggcgcctattttatagctatgcgattggataagaaaacatatctgccgcaagctattaggcgaggtactggagacgcgtggatggttaaaaaggcggcaaaggtcgatccatctgctcaacaattttgtcagtatttgataaaacacaagtctaataatgttattacttgtggtaatgagatgttaaatgaattaggttatagcggttattttatgtcaccgcattggtgttccgattttagtaatatggaatagtgttagataaatgcggtaacgaatgttcctgtaaggaaccataacagcttagatttaacgttaaagatgagcataaacataataaacaaaattacaatcaaacctataacattaatatcaaacaatccaaaaaatgaaatcagtggagtagtaaacgcgtacataactcctggataacgtttagtagctgccgttcctattctagaccaaaaatttggtttcatgttttcaaagcggtgttctgcaacaagtcggggatcgtgttctacatatttggcggcattatccagtatctgcctattgatcttcatttcgttttcaattctggctatttcaaaataaaatcccgatgatagacctccagactttataatttcatctacgatgttcagcgccgtagtaactctaataatataggctgataagctaacatcataccctcctgtatatgtgaatatggcatgatttttgtccattacaagctcggttttaactttattgcctgtaataatttctctcatctgtaggatatctatttttttgtcatgcattgccttcaagacgggacgaagaaacgtaatatcctcaataacgttatcgttttctacaataactacatattctacctttttattttctaactcggtaaaaaaattagaatcccatagggctaaatgtctagcgatatttcttttcgtttcctctgtacacatagtgttacaaaaccctgaaaagaagtgagtatacttgtcatcatttctaatgtttcctccagtccactgtataaacgcataatccttgtaatgatctggatcatccttgactaccacaacatctcttttttctggcataacttcgttgtccttcacatcatcgaacttctgatcattaatatgctcatgaacattaggaaatgtttctgatggaggtctatcaataactggcacaacaataacaggagttttcgccgccgccatttagttattgaaattaatcatatacaactctctaatacgagttatattttcgtctatccattgtttcacatttacatatttcgacaaaaagatataaaatgcgtattccaatgcttctctgtttaatgaattactaaaatatacaaacacgtcactgtctggcaataaatgatatcttagaatattgtaacaatttattttgtattgcacatgttcgtgatctatgagttcttcttcgaatggcataggatctccgaatctgaaaacgtataaataggagttagaataataatatttgagagtattggtaatatataaactctttagcggtataattagtttttttctctcgatttctatttttagatgtgatggaaaaatgactaattttgtagcattagtatcatgaactctaatcaaaatcttaatatcttcgtcacacgttagctctttgaagtttttaagagatgcatcagttggttctacagatggagtaggtgcaacaattttttgttctacacatgtatgtactggagccattgttttaactataatggtgcttgtatcgaaaaactttaatgcagatagcggaagctcttcgccgcgactttctacatcgtaattgggttctaacgccgatctctgaatggatactagttttctaagttctaatgtgattctctgaaaatgtaaatccaattcctccggcattatagatgtgtatacatcggtaaataaaactatagtatccaacgatcccttctcgcaaattctagtcttaaccaagaaatcgtatataaccacggagatggcgtatttaagagtggattcttctaccgttttgttcttggatgtcatataggaaactataaagtccgcactactgttaagaatgattactaacgcaactatatagttcaaattaagcattttggaaacataaaataactctgtagacgatacttgactttcgaataagtttgcagacaaacgaagaaagaacagacctctcttaatttcagaagaaaactttttttcgtattcctgacgtctagagtttatatcaataagaaagttaagaattagtcggttaatgttgtatttcattacccaagtttgagatttcataatattatcaaaagacatgataatattaaagataaagcgctgactatgaacgaaatagctatatggttcgctcaagaatatagtcttgttaaacgtggaaacgataactgtatttttaatcacgtcagcggcatctaaattaaatataggtatatttattccacacactctacaatatgccacaccatcttcataataaataaattcgttagcaaaattattaattttagtgaaatagttagcgtcaactttcatagcttccttcaatctaatttgatgctcacacggtgcgaattccactctaacatcccttttccatgcctcaggttcatcgatctctataatatctagttttttgcgtttcacaaacacaggctcgtctctcgcgatgagatctgtatagtaactatgtaaatgataactagatagaaagatgtagctatatagatgacgatcctttaagagaggtataataactttaccccaatcagatagactgttgttatggtcttcggaaaaagaatttttataaatttttccagtattttccaaatatacgtacttaacatctaaaaaatccttaatgataataggaatggataatccgtctattttataaagaaatacatatcgcacattatacttttttttggaaatgggaataccgatgtgtctacataaatatgcaaagtctaaatattttttagagaatcttagttggtccaaattcttttccaagtacggtaatagatttttcatattgaacggtatcttcttaatctctggttctagttccgcattaaatgatgaaactaagtcactatttttataactaacgattacatcacctctaacatcatcatttaccagaatactgatcttcttttgtcgtaaatacatgtctaatgtgttaaaaaaaagatcatacaagttatacgtcatttcatctgtggtattcttgtcattgaaggataaactcgtactaatctcttctttaacagcctgttcaaatttatatcctatatacgaaaaaatagcaaccagtgtttgatcatccgcgtcaatattctgttctatcgtagtgtataacaatcgtatatcttcttctgtgatagtcgatacgttataaaggttgataacgaaaatatttttatttcgtgaaataaagtcatcgtaggattttggacttatattcgcgtctagtagatatgcttttatttttggaatgatctcaattagaatagtctctttagagtccatttaaagttacaaacaactaggaaattggtttatgatgtataatttttttagtttttatagattctttattctatacttaaaaaatgaaaataaatacaaaggttcttgagggttgtgttaaattgaaagcgagaaataatcataaattatttcattatcgcgatatccgttaagtttgtatcgtaatggcgtggtcaattacaaataaagcggatactagtagcttcacaaagatggctgaaatcagagctcatctaaaaaatagcgctgaaaataaagataaaaacgaggatattttcccggaagatgtaataattccatctactaagcccaaaaccaaacgagccactactcctcgtaaaccagcggctactaaaagatcaaccaaaaaggataaagaaaaggaggaagtggaagaagaagtagttatagaggaatatcatcaaacaactgaaaaaaattctccacctccgttatcatctcctggagtcggcgacattgtagaaagcgtggctgctgtagagctcgatgatagcgacggggatgatgaacctatggtacaagttgaagctggtaaagtaaatcatagtgctagaagcgatctttctgacctaaaggtggctaccgacaatatcgttaaagatcttaagaaaattattactagaatctctgcagtatcgacggttctagaggatgttcaagcagctggtatctctagacaatttacttctataactaaagctattacaacactatctgatctagtcaccgagggaaaatctaaagttgttcgtaaaaaagttaaaacttgtaagaagtaaatgcgtgcacttttttataaagatggtaaactctttaccgataataattttttaaatcctgtatcagatgataatccagcgtatgaggttttgcaacatgttaaaattcctactcatttaacagatgtagtagtatatgaacaaacgtgggaagaggcattaactagattaatttttgtgggaagcgattcaaaaggacgtagacaatacttttacggaaaaatgcatgtacaaaatcgcaacgctaaaagagatcgtatttttgttagagtatataacgttatgaaacgaattaattgttttataaacaaaaatataaagaaatcgtccacagattccaattatcagttggcggtttttatgttaatggaaactatgttttttattagatttggtaaaatgaaatatcttaaggagaatgaaacagtagggttattaacactaaaaaataaacacatagaaataagtcccgatgaaatagttatcaagtttgtaggaaaggacaaagtttcacatgaatttgttgttcataagtctaatagactatataagccgctattgaaactgacggatgattctagtcccgaagaatttctgttcaacaaactaagtgaacgaaaggtatatgaatgtatcaaacagtttggtattagaatcaaggatctccgaacgtatggagtcaattatacgtttttatataatttttggacaaatgtaaagtccatatctcctcttccgtcaccaaaaaagttaatagcattaactatcaaacaaactgctgaagttgtaggtcatactccatcaatttcaaaaagagcttatatggcaacgactattttagaaatggtaaaggataaaaattttttagatgtagtatctaaaactacgttcgatgaattcctatctatagtcgtagatcacgttaaatcatctacggatggatgatatagatctttacacaaataattacaagaccgataaatggaaatggataagcgtataaaatctctcgcaatgaccgctttctttggggagctaagcacattggatattatggcattgataatgtctatatttaaacgccatccaaacaataccattttttcagtggataaggatggtcagtttatgattgatttcgaatacgataattataaggcttctcaatatttggatctgaccctcactccgatatttggagatgaatgcaagactcacgcatcgagtatagccgaacaattggcgtgtgcggatattattaaagaggatattagcgaatacatcaaaactactccccgtcttaaacgatttataaaaaaataccgcaatagatcagatactcgcatcagtcgagatacagaaaagcttaaaatagctctagctaaaggcatagattacgaatatataaaagacgcttgttaataagtaaatgaaaaaaaactagtcgtttataataaaacacaatatggatgccaacatagtatcatcttctactattgcaacgtatatagacgctttagcgaagaatgcttcagaattagaacagaggtctaccgcatacgaaataaataatgaattggaactagtatttattaagccgccattaattactttgacaaatgtagtgaatatctctacgattcaggaatcgtttattcgatttaccgttactaataaggaaggtgttaaaattagaactaagattccattatctaaggtacatggtctagatgtaaaaaatgtacagttagtagatgctatagataacatagtttgggaaaagaaatcattagtgacggaaaatcgtcttcacaaagaatgcttgttgagactatcgacagaggaacgtcatatatttttggattacaaaaaatatggatcctctatccgactagaattagtcaatcttattcaagcaaaaacaaaaaactttacgatagactttaagctaaaatattttctaggatccggtgcccagtctaaaagttctttattacacgctattaatcatccaaagtcaaggcctaatacatctctggaaatagaattcacacctagagacaatgaaaaagttccatatgatgaactaataaaggaattgacgactctatcacgtcatatatttatggcttctccagagaatgtaattctttctccgcctattaacgcgcctataaaaacctttatgttgcctaaacaagatatagtaggtttggatctggaaaatctatatgccgtaactaagactgacggcattcctataactatcagagttacatcaaacgggttgtattgttattttacacatcttggttatattattagatatcctgttaagagaataatagattccgaagtagtagtctttggtgaggcagttaaggataagaactggaccgtatatctcattaagctaatagagcctgtgaatgcaatcaatgatagactagaagaaagtaagtatgttgaatctaaactagtggatatttgtgatcggatagtattcaagtcaaagaaatatgaaggtccgtttactacaactagtgaagtcgtcgatatgttatctacatatttaccaaagcaaccagaaggtgttattttgttctattcaaagggacctaaatctaacattgattttaaaattaaaaaggaaaatactatagaccaaactgcaaatgtagtatttaggtacatgtccagtgaaccaattatctttggagaatcgtctatctttgtagagtataagaaatttagcaacgataaaggctttcctaaagaatatggttctggtaagattgtgttatataacggcgttaattatctaaataatatctattgtttggaatatattaatacacataatgaagtgggtattaagtccgtggttgtacctattaagtttatagcagaattcttagttaatggagaaatacttaaacctagaattgataaaaccatgaaatatattaactcagaagattattatggaaatcaacataatatcatagtcgaacatttaagagatcaaagcatcaaaataggagatatctttaacgaggataaactatcggatgtgggacatcaatacgccaataatgataaatttagattaaatccagaagttagttattttacgaataaacgaactagaggaccgttgggaattttatcaaactacgtcaagactcttcttatttctatgtattgttccaaaacatttttagacgattccaacaaacgaaaggtattggcgattgattttggaaacggtgctgacctggaaaaatacttttatggagagattgcgttattggtagcgacggatccggatgctgatgctatagctagaggaaatgaaagatacaacaaattaaactctggaattaaaaccaagtactacaaatttgactacattcaggaaactattcgatccgatacatttgtctctagtgtcagagaagtattctattttggaaagtttaatatcatcgactggcagtttgctatccattattcttttcatccgagacattatgctaccgtcatgaataacttatccgaactaactgcttctggaggcaaggtattaatcactaccatggacggagacaaattatcaaaattaacagataaaaagacttttataattcataagaatttacctagtagcgaaaactatatgtctgtagaaaaaatagctgatgatagaatagtggtatataatccatcaacaatgtctactccaatgactgaatacattatcaaaaagaacgatatagtcagagtgtttaacgaatacggatttgttcttgtagataacgttgatttcgctacaattatagaacgaagtaaaaagtttattaatggcgcatctacaatggaagatagaccgtctacaaaaaactttttcgaactaaatagaggagccattaaatgtgaaggtttagatgtcgaagacttacttagttactatgttgtttatgtcttttctaagcggtaaataataatatggtatgggttctgatatccccgttctaaatgcattaaataattccaatagagcgatttttgttcctataggaccttccaactgtggatactctgtattgttaatagatatattaatacttttgtcgggtaacagaggttctacgtcttctaaaaataaaagtttgataacatctggcctgttcataaataaaaacttggcgattctatatatactcttattatcaaatctagccattgtcttatagatgtgagctactgtaggtgtaccatttgattttctttctaatactatatatttctctcgaagaagttcttgcacatcatctgggaataaaatactactgttgagtaaatcagttattttttttatatcgatattgatggacatttttatagttaaggataataagtatcccaaagtcgataacgacgataacgaagtatttatacttttaggaaatcacaatgactttatcagattaaaattaacaaaattaaaggagcatgtatttttttctgaatatattgtgactccagatacatatggatctttatgcgtcgaattaaatgggtctagttttcagcacggtggtagatatatagaggtggaggaatttatagatgctggaagacaagttagatggtgttctatatccaatcatatatctaaagatatacccgaagatatgcacactgataaatttgtcatttatgatatatacacttttgacgctttcaagaataaacgattggtattcgtacaggtacctccgtcgttaggagatgatagtcatttgactaacccgttattgtcaccgtattatcgtaatttagtagccagacaaatggtcaataatatgatttttaatcaagattcatttttaaaatatttattagaacatctgattagaagccactatagagtttctaaacatataacaatagttagatacaaggataccaaagaattaaatctaacgagaatatgttataatagagataagtttaaggcgtttgtattcgcttggtttaacggcgtttcggaaaatgaaaaggtactagatacgtataaaaaggtatctaatttgatataatgaatttggtgactgtatcacacgcaccatatactattacttatcataatgattgggaaccagttatgagtcaattggtagagttttataacgaagtagccagttggctgctacgagacgagacgtcgcctattcctgataagttctttatacagttgaaacaaccgcttagaaataaacgagtatgtgtgtgcggtatagatccgtatccgaaagatggaactggtgtaccgttcgaatcaccaaattttacaaaaaaatcaattaaggagatagcttcatctatatctagattaaccggagtaattgattataaaggttataaccttaatataatagacggggttataccctggaattattacttaagttgtaaattaggagaaacaaaaagtcacgcgatttactgggataaaatttctaagttactgctgcagcatataactaaacacgttagtgttctttattgtttgggtaaaacagatttctcgaatatacgggccaagttagaatccccggtaactaccatagtcggatatcatccagcggctagagaccgccaattcgagaaagatagatcatttgaaattatcaacgttttactggaattagacaacaaggcacctataaattgggctcaagggtttatttattaatgctttagtgaaattttaacttgtgttctaaatggatgcaactattagaggtaatgatgttatctttgtccttaagactataggtgtcccatcagcatgtagacaaaatgaagatccaagattcgtagaagcatttaaatgcgacgagttagaaagatatattgataataatccagaatgttcactatttgaaagtcttagggatgaggaagcatattctatagtcagaattttcatggatgtagatttagacgcgtatctagacgaaatagattatttaacggccattcaagattttattatcgaggtgtcaaactgtgtagctagattcgcgtttacagaatgcggcgccattcatgaaaatgtaataaaatccatgagatctaatttttcattgactaagtctacaaatagagataaaacaagttttcatattatctttttagatacgtataccactatggatacattgatagctatgaaacgaacactattagaattaagtagatcatctgaaaatccactaacaagatcgatagacactgccgtatataggagaaaaacaactcttcgggttgtaggtactaggaaaaatccaaattgcgacactattcatgtaatgcaaccacctcatgataatatagaagattacctattcacttacgtggatatgaacaacaatagttattacttttctctacaacaacgattggaggatttagttcctgataagttatgggaaccagggtttatttcattcgaagacgctataaaaagagtttcaaaaatattcattaattctataataaactttaatgatctcgatgaaaataattttacaacggtaccactggtcatagattacgtaacaccttgtgcattatgtaaaaaacgatcgcataaacatccgcatcaactatcgttggaaaatggtgctattagaatttacaaaactggtaatccacatagttgtaaagttaaaattgttccgttggatggtaataaactgtttaatattgcacaaagaattttagacactaactctgttttattaaccgaacgaggagaccatatagtttggattaataattcatggaaatttaacagcgaagaacccttgataacaaaactaattttgtcaataagacatcaactacctaaggaatattcaagcgaattactctgtccaagaaaacgaaagactgtagaagctaacatacgagacatgttagtagattcagtggagaccgatacctatccggataaacttccgtttaaaaatggtgtattggacctggtagacggaatgttttactctggagataatgctaaaaaatatacgtgtactgtatcaaccggatttaaatttgacgatacaaagttcgtcgaagacagtccagaaatggaagagttaatgaatatcattaacgatatccaaccattaacggatgaaaataagaaaaatagagagctatatgaaaaaacattatctagttgtttatgtggtgctaccaaaggatgtttaacattcttttttggagaaactgcaactggaaagtcgacaaccaaacgtttgttaaagtctgctatcggtgacctgtttgttgagacgggtcaaacaattttaacagatgtattggataaaggacctaatccatttatcgctaacatgcatttgaaaagatctgtattctgtagcgaactacctgattttgcctgtagtggatcaaagaaaattagatctgacaatattaaaaagttgacagaaccttgtgtcattggaagaccgtgtttctccaataaaattaataatagaaaccatgcgacaatcattatcgatactaattacaaacctgtttttgataggatagataacgcattaatgagaagaattgccgtcgtgcgattcagaacacacttttctcaaccttctggtagagaggctgctgaaaataatgacgcgtacgataaagtcaaactattagacgaggggttagatggtaaaatacaaaataatagatatagatttgcatttctatacttgttggtgaaatggtacagaaaatatcatgttcctattatgaaactatatcctacacccgaagagattcctgactttgcattctatctcaaaataggtactctgttagtatctagctctgtaaagcatattccattaatgacggacctctccaaaaagggatatatattgtacgataatgtggttactcttccgttgactactttccaacagaaaatatccaagtattttaattctagactatttggacacgatatagagagcttcatcaatagacataagaaatttgccaatgttagtgatgaatatctgcaatatatattcatagaggatatttcatctccgtaaatatatgctcatatatttatagaagatatcacatatctaaatgaataccggaattatagatttatttgataatcatgttgatagtataccaactatattacctcatcagttagctactctagattatctagttagaactatcatagatgagaacagaagcgtgttattgttccatattatgggatcaggtaaaacaataatcgctttgttgttcgccttggtagcttccagatttaaaaaggtttacattctagtgcctaatatcaacattttgaaaatttttaattataatatgggtgtagctatgaacttgtttaatgacaaattcatagctgagaatatctttattcattccacaacaagtttttattctcttaattataacgataacgtcattaattataacggattatctcgctacaataactctatttttatcgttgatgaggcacataatatctttgggaataatactggagaacttatgaccgtgataaaaaataaaaacaagattccttttttactattgtctggatctcccattactaacacacctaatactctgggtcatattatagatttaatgtccgaagagacgatagattttggtgaaattattagtcgtggtaagaaagtaattcaaacacttcttaacgaacgaggtgtgaatgtacttaaggatttgcttaaaggaagaatatcatattacgaaatgcctgataaagatctaccaacgataagatatcacggacgtaagtttctagatactagagtagtatattgtcacatgtctaaacttcaagagagagattatatgattactagacgacagctatgttatcatgaaatgtttgataaaaatatgtataacgtgtcaatggcagtattgggacaacttaatctgatgaataatttagatactttatttcaggaacaggataaggaattgtacccaaatctgaaaataaataatggcgtgttatacggagaagaattggtaacgttaaacattagttccaaatttaaatactttatcaatcggatacagacactcaacggaaaacattttatatacttttctaattctacatatggcggattggtaattaaatatatcatgctcagtaatggatattctgaatataatggttctcagggaactaatccacatatgataaacggcaaaccaaaaacatttgctatcgttactagtaaaatgaaatcgtctttagaggatctattagatgtgtataattctcctgaaaacgatgatggtagtcaattgatgtttttgttttcatcaaacattatgtccgaatcctatactctaaaagaggtaaggcatatttggtttatgactatcccagatactttttctcaatacaaccaaattcttggacgatctattagaaaattctcttacgccgatatttctgaatccgttaatgtatatcttttagccgccgtatattccgatttcaatgacgaagtgatgtcattaaacgattacacacaggatgaattgattaatgttttaccatttgacatcaaaaagctgttgtatctaaaatttaagactaaagaaacgaatagaatatactctattcttcaagagatgtctgaaacgtattctcttccaccacatccatcaattgtaaaagttttattgggagaattggtcagacaatttttttataataattctcgtattaagtataacgataccaagttacttaaaatggttacatcagttataaaaaataaagaagacgctaggaattacatagatgatattgtaaacggtcacttctttgtatcgaataaagtatttgataaatctcttttatacaaatacgaaaacgatattattacagtaccgtttagactttcctacgaaccatttgtttggggagttaactttcgtaaagaatataacgtggtatcttctccataaaactgatgagatatataaagaaataaatgtcgagctttgttaccaatggataccttccagttacattggaaccacacgagctgacgttagacataaaaactaatattaggaatgccgtatataagacgtatctccatagagaaattagtggtaaaatggccaagaaaatagaaattcgtgaagacgtggaattacctctcggcgaaatagttaataattctgtagttataaacgttccgtgtgtaataacctacgcgtattatcacgttggggatatagtcagaggaacattaaacatcgaagatgaatcaaatgtaactattcaatgtggagatttaatctgtaaactaagtagagattcgggtactgtatcatttagcgattcaaagtactgcttttttcgaaatggtaatgcgtatgacaatggcagcgaagtcactgccgttctaatggaggctcaacaaggtatcgaatctagttttgtttttctcgcgaatatcgtcgactcataaaaaagagaatagcggtaagtataaacacgaatactatggcaataattgcgaatgttttattcccttcgatatatttttgataatatgaaaaacatgtctctctcaaatcggacaaccatctcataaaatagttctcgcgcgctggagaggtagttgctgctcgtataatctccccagaataatatacttctgtgtcatcgttcaatttatacggatttctatagttctctgttatatgatgcggtttgccctcatgattagacaacgacaatagtgttctgaatttagatagttgatcagaatgaatgtttattggcgttggaaaaattatccatacagcgtctgcagagtggttgatagttgttcctagatatgtaaaataatccaacttactaggcagcaaattgtctagataaaatactgaatcaaacggtgcagacgtattggcggatctaatggaatccaattgattgactatcttttgaaaatatacatttttatgatccaatacttgtaaaaatatagaaataatgataagtccatcatcgtgtttttttgcctcttcataagaactatattttttcttattccaatgaacaagattaatctctccagagtatttgtacacatctatcaagtgattggatccataatcgtcttcctttccccaatatatatgtagtgatgataacacatattcattggggagaaaccctccacttatatatcctcctttaaaattaatccttactagttttccagtgttctggatagtggttggtttcgactcattataatgtatgtctaacggcttcaatcgcgcgttagaaattgcttttttagtttctatattaataggagatagttgttgcggcatagtaaaaatgaaatgataactgtttaaaaatagctcttagtatgggaattacaatggatgaggaagtgatatttgaaactcctagagaattaatatctattaaacgaataaaagatattccaagatcaaaagacacgcatgtgtttgctgcgtgtataacaagtgacggatatccgttaataggagctagaagaacttcattcgcgttccaggcgatattatctcaacaaaattcagattctatctttagagtatccactaaactattacggtttatgtactacaatgaactaagagaaatctttagacggttgagaaaaggttctatcaacaatatcgatcctcactttgaagagttaatattattgggtggtaaactagataaaaaggaatctattaaagattgtttaagaagagaattaaaagaggaaagtgatgaacgtataacagtaaaagaatttggaaatgtaattctaaaacttacaacacgggataaattatttaataaagtatatataggttattgcatggcgtgttttattaatcaatcgttgaaggatttatcgcatactagtatttacaatgtagaaattagaaagattaaatcattaaatgattgtattaacgacgataaatacgaatatctgtcttatatttataatatgctagttaatagtaaatgaacttttacagatctagtataattagtcagattattaagtataatagacgactagctaagtctattatttgcgaggatgactctcaaattattacactcacggcattcgttaaccaatgcctatggtgtcataaacgagtatccgtgtccgctattttattaactactgataacaaaatattagtatgtaacagacgagatagttttctctattctgaaataattagaactagaaacatgtctagaaagaaacgattatttctgaattattccaattatttgaacaaacaggaaagaagtatactatcgtcatttttttctctagatccagctactactgataatgatagaatagatgctatttatccgggtggcatacccaaaaggggtgagaatgttccagagtgtttatccagggaaattaaagaagaagttaatatagacaattcttttgtattcatagacactcggttttttattcatggcatcatagaagataccattattaataaattttttgaggtaatcttctttgtcggaagaatatctctaacgagtgatcaaatcattgatacatttaaaagtaatcatgaaatcaaggatctaatatttttagatccgaattcaggtaatggactccaatacgaaattgcaaaatatgctctagatactgcaaaactcaaatgttatggccatagaggatgttattacgaatcattaaaaaaattaactgaggatgattgattagaaaatataaattaatttaccatcgtgtatttttataacgggattgtccggcatatcatgtagatagttaccgtctacatcgtatactcgaccatctacgcctttaaatcctctatttattgacattaatctattagaattggaataccaaatattagtaccctcaattagtttattggtaatattttttttagacgatagatcgatggctcttgaaaccaaggttttccaaccggactcattgtcgatcggtgagaagtctttttcattagcatgaatccattctaatgatgtatgtttaaacactctaaacaattggacaaattcttttgatttgctttgaatgatttcaaataggtcttcgtctacagtaggcataccattagataatctagccattataaagtgcacgtttacatatctacgttctggaggagtaagaacgtgactattgagacgaatggctcttcctactatctgacgaagagacgcctcgttccatgtcatatctaaaatgaagatatcattaattgagaaaaaactaataccctcgcctccactagaagagaatacgcatgttttaatgcattctccgttagtgtttgattcttggttaaactcagccaccgccttgattctagtatcttttgttctagatgagaactctatattagagataccaaagactttgaaatatagtaataagatttctattcctgactgattaacaaatggttcaaagactagacatttaccatgggatgctaatattcccaaacatacatctataaatttgacgcttttctcttttaattcagtaaatagagagatatcagccgcactagcatcccctttcaatagttctccctttttaaaggtatctaatgcggatttagaaaactctctatctcttaatgaatttttaaaatcattatatagtgttgctatctcttgcgcgtattcgcccggatcacgattttgtctttcaggaaagctatcgaacgtaaacgtagtagccatacgtctcagaattctaaatgatgatatacctgtttttatttcagcgagtttagccttttgataaatttcttcttgctttttcgacatattaacgtatcgcattaatactgttttcttagcgaatgatgcagacccttctacgtcatcaaaaatagaaaactcgttattaactatgtacgaacataggcctcctagtttggagactaattctttctcatcaactagacgtttattctcaaatagcgattggtgttgtaaggatcctggtcgtagtaagttaaccaacatggtgaattcttgcacactattgacgataggtgtagctgataaacaaatcatcttatggttttttaacgcaatggtcttagataaaaaattatatactgaacgagtaggacggatcttaccatcttctttgattaatgatttagaaatgaagttatgacattcatcaataatgacgcatattctactcttggaattaatagttttgatattagtaaaaaatttatttctaaaattttgatcatcgtaattaataaaaatacaatccttcgttatctctggagcgtatctgagtatagtgttcatccaaggatcttctatcaaagcctttttcaccaataagataatagcccaattcgtataaatatccttaagatgtttgagaatatatacagtagtcattgttttaccgacacccgtttcatggaacaataaaagagaatgcatactgtctaatcctaagaaaactcttgctacaaaatgttgataatccttgaggcgtactacgtctgttcccatcatttcaacaggcatattagtagttctgcgcaatgcataatcgatataggccgcgtgtgatttactcatttatgagtgataagtaataactatgttttaaaaatcacagcagtagtttaactagtcttctctgatgtttgttttcgatactttttgaatcagaagtcatactagaataaagcaacgagtgaacgtaatagagagcttcgtatactctattcgaaaactctaagaacttattaatgaattccgtatccactggattgtttaaaatactaaattgaacactgttcacatccttccaagaagaagacttagtgacggacttaacatgagacataaataaatccaaattttttttacaaacatcactagccaccataatggcgctatctttcaaccagctatcgcttacgcattttagcagtctaacatttttaaagagactacaatatattctcatagtatcgattacacctctaccgaataaagttggaagtttaataatacaatatttttcgtttacaaaatcaaataatggtcgaaacacgtcgaaggttaacatcttataatcgctaatgtatagattgttttcagtgagatgattattagatttaatagcatctcgttcacgtttgaacagtttattgcgtgcgctgaggtcggcaactacggcgtccgctttagtactcctcccataatactttacgctattaatctttaaaatttcatagactttatctagatcgctttctggtaacatgatatcatgtgtaaaaagttttaacatgtcggtcggcattctatttagatcattaactctagaaatctgaagaaagtaattagctccgtattccagactaggtaatgggcttttacctagagacagattaagttctggcaatgtttcataaaatggaagaaggacatgcgttccctcccggatattttttacaatttcatccatttacaactctatagtttgttttcattattattagttattatctcccataatcttggtaatacttaccccttgatcgtaagataccttatacaggtcattacatacaactaccaattgtttttgtacataatagattggatggttgacatccatggtggaataaactactcgaacagatagtttatctttccccctagatacattagccgtaatagttgtcggcctaaagaatatctttggtgtaaagttaaaagttagggttcttgttccattattgctttttgtcagtagttcattataaattctcgagatgggtccgttctctgaatatagaacatcatttccaaatctaacttctagtctagaaataatatcggtcttattcttaaaatctattcccttgatgaagggatcgttaatgaacaaatccttggcctttgattcggctgatctattatctccgttatagacgttacgttgactagtccaaagacttacaggaatagatgtatcgatgatgttgatactatgtgatatgtgagcaaagactgttctcttagtggcatcactatatgttccagtaatggcggaaaactttttagaaatgttatatataaaagaattttttcgtgttccaaacattagcagattagtatgaagataaacactcatattatcaggaacattatcaatttttacatacacatcagcatcttgaatagaaacgataccatcttctggaacctcaacaatctcggcagactccggataaccagtcggtgggccatcactaacaataactagatcatccaacaatctactcacatatgcatctatataatctttttcatcttgtgagtaccctggatacgaaataaatttattatccgtatttccataataaggtttagtataaacagagagcgatgttgccgcatgaacttcagttacagtcgccgttggttggtttatttgacctattactctcctaggtttctctataaacgatggtttaatttgtacattcttaaccatatatccaataaagctcaattcaggaacataaacaaattctttgttgaacgtttcaaagtcgaacgaagagtcacgaataacgatatcggatactggattgaaggttaccgttacggtaatttttgaatcggatagtttaagactgctgaatgtatcttccacatcaaacggagttttaatataaacgtatactgtagatggttctttaatagtgtcattaggagttaggccaatagaaatatcattaagttcactagaatatccagagtgtttcaaagcaattgtattattgatacaattattatataattcttcgccctcaatttcccaaataacaccgttacacgaagagaccgatacgtaattaatacatttatatccaacatatggtacgtaaccgaatcttcccatacctttaacttctggaagttccaaactcagaaccaaatgattaagcgcagtaatatactgatccctaatttcgaagctagcgatagcctgattgtctggaccatcgtttgtcataactccggatagagaaatatattgcggcatatataaagttggaatttgactatcgactgcgaagacattagaccgtttaatagagtcatccccaccgatcaaagaattaatgatagtattattcattttctatttaaaatgg

SEQ ID NO: 7 - DNA, 30252 bp, Horsepox virus
ttagttattatctcccataatcttggtaatacttaccccttgatcgtaagataccttatacaggtcattacatacaactaccaattgtttttgtacataatagattggatggttgacatccatggtggaataaactactcgaacagatagtttatctttccccctagatacattagccgtaatagttgtcggcctaaagaatatctttggtgtaaagttaaaagttagggttcttgttccattattgctttttgtcagtagttcattataaattctcgagatgggtccgttctctgaatatagaacatcatttccaaatctaacttctagtctagaaataatatcggtcttattcttaaaatctattcccttgatgaagggatcgttaatgaacaaatccttggcctttgattcggctgatctattatctccgttatagacgttacgttgactagtccaaagacttacaggaatagatgtatcgatgatgttgatactatgtgatatgtgagcaaagactgttctcttagtggcatcactatatgttccagtaatggcggaaaactttttagaaatgttatatataaaagaattttttcgtgttccaaacattagcagattagtatgaagataaacactcatattatcaggaacattatcaatttttacatacacatcagcatcttgaatagaaacgataccatcttctggaacctcaacaatctcggcagactccggataaccagtcggtgggccatcactaacaataactagatcatccaacaatctactcacatatgcatctatataatctttttcatcttgtgagtaccctggatacgaaataaatttattatccgtatttccataataaggtttagtataaacagagagcgatgttgccgcatgaacttcagttacagtcgccgttggttggtttatttgacctattactctcctaggtttctctataaacgatggtttaatttgtacattcttaaccatatatccaataaagctcaattcaggaacataaacaaattctttgttgaacgtttcaaagtcgaacgaagagtcacgaataacgatatcggatactggattgaaggttaccgttacggtaatttttgaatcggatagtttaagactgctgaatgtatcttccacatcaaacggagttttaatataaacgtatactgtagatggttctttaatagtgtcattaggagttaggccaatagaaatatcattaagttcactagaatatccagagtgtttcaaagcaattgtattattgatacaattattatataattcttcgccctcaatttcccaaataacaccgttacacgaagagaccgatacgtaattaatacatttatatccaacatatggtacgtaaccgaatcttcccatacctttaacttctggaagttccaaactcagaaccaaatgattaagcgcagtaatatactgatccctaatttcgaagctagcgatagcctgattgtctggaccatcgtttgtcataactccggatagagaaatatattgcggcatatataaagttggaatttgactatcgactgcgaagacattagaccgtttaatagagtcatccccaccgatcaaagaattaatgatagtattattcattttctatttaaaatggaaaaagcttacaataaactccgtagagaaatatctataatttgtgagttttccttaaagtaacagcttccgtaaacgccgtctttatctcttagtaagtttattgtatttataaccttttccttatcttcatagaatactaaaggcaacaaagaaatttttggttcttctctaagagctacgtgagacttaaccatagacgccaacgaatccctacatattttagaacagaaatacccaacttcaccacccttgaatgtctcaatactaataggtttaaaaaccaaatcttgattacaaaaccaacacttatcaattacactatttgtcttaatagacacatctgccatagatttataatactttggtagtatacaagcgagtgcttcttctttagcgggcttaaaaactgctttaggtgctgaaataaccacatctggaaggcttactcgcttagccatttaattacggaactatttttttatacttctaatgagcaagtagaaaacctctcatctacaaaaacgtactcgtgtccataatcctctaccatagtaacacgttttttagatctcatatgtgctaaaaagttttcccatactaattggttactattatttttcgtataatttttaacagtttgaggttttagatttttagttacagaagtgatatcgaatattttatccaaaaagaatgagtaattaattgtcttagaaggagtgttttcttggcaaaagaataccaagtgcttaaatatttctactacttcattaattttttcggtactcagattcagtttctcatcttttacttgattgattatttcaaaaactaacttataatcctttttatttattctctcgttagccttaagaaaactagatacaaaatttgcatctacatcatccgtggatatttgatttttttccatgatatccaagagttccgagataatttctccagaacattgatgagacaataatctccgcaatacatttctcaaatgaataagtttattagacacgtggaagtttgactttttttgtacctttgtacatttttgaaataccgactcgcaaaaaatacaatattcatatccttgttcagatactataccgttgtgtctacaaccgctacataatcgtagattcatgttaacactctacgtatctcgtcgtccaatattttatataaaaacattttatttctagacgttgccagaaaatcctgtaatatttttagttttttgggctgtgaataaagtatcgccctaatatggttaccgtcctctgccaatatagtagttaaattatccgcacatgcaaaagaacaccgcttaggcggattcagtacaatgttatatttttcgtaccaactcatttaaatatcataatctaaaatagttctgtaatatgtctagcgctaatatattgatcataatcctgtgcataaattaagatacaacaatgtctcgaaatcatcgacatggcttcttccatagttagaagatcgtcgtcaaagttagcaacgtgattcatcaacatttgctgttttgaggcagcaaatactgaaccgtcgccattcaaccattcataaaaaccatcgtctgaatccattgataatttcttgtactggtttttgagagctcgcatcaatctagcatttctagctcccggattgaaaacagaaagaggatcgtacatccagggtccattttctgtaaatagaatcgtataatgtcccttcaagaagatatcagacgatccacaatcaaagaattggtctccgagtttgtaacagacagcggactttaacctatacatgataccgtttagcataatttctggtgatacgtcaatcggagtatcatctattagagatctaaagccggtgtaacattctccaccaaacatattcttattctgacgtcgttctacataaaacatcattgctccattaacgataacaggggaatgaacagcactacccatcacattagttcccaatggatcaatgtgtgtaactccagaacatcttccatatcctatgttaggaggagcgaacaccactcttccactattgccatcgaatgccatagaataaatatccttggaattgatagaaatcggactgtcggatgttgtaatcatcttcataggattaacaactatgtatggtgccgcctgaagtttcatatcgtaactgatgccgtttataggtctagccacagaaaccaacgtaggtctaaatccaactatagacaaaatagaagccaatatctgttcctcatctgtcataacttgagagcatccagtatgaataatcttcattagatggggatctatcgcatcatcatcgttacaataaaaaattcccattctaatgttcataattgcttttctaatcatggtatgcatgtttgctctctgaatctctgtggaaattagatctgatacacctgtaatcactatcggattatcctccgtaagacgattaaccaacaacatataattataagactttactcttctaaattcataaagttgctggattaggctataggtgtctccatgtacatacgcgttctcgagcgcaggaagtttaataccgaatagtgccatcagaataggatgaatatagtaattagtttctggttttctataaataaaagacaaatcttgtgaactagacatatcggtaaaatgcatggattggaatcgtgtagtcgacagaagaatatgatgattagatggagagtatattttatctaactctttaagttggtcaccgattctaggactagctcgagaatgaataagtactaaaggatgagtacatttcacagaaacactagcattgttcaatgtgctctttacatgggtaaggagttgaaatagctcgtttctatttgttctgacaatatttagtttattcataatgttaagcatatcctgaatagtaaagttagatgtgtcatacttgttagtagttagatatttagcaattgcattcccatcatttctcaatctcgtactccaatcatgtgtagatgctacttcatctatagaaaccatacaatcctttttggtagtttgttgagcttgatcatttcctgcacgtttaggtttggtacgttgatttctagcccctgcagatataaagtcatcgtctacaattttggataatgaattgcatacactacaagacaaagatttatcagaagtgtgaatatgatcttcatctaccaaagaaagagtttgattagtataactagattttagtcctgcgttagatgttaaaaaaacatcgctattgaccacggcttccattatttatattcgtagtttttactcgaaagcgtgattttaatatccaatcttattacttttggaatcgttcaaaacctttgactaattgtagaatttgatctattgccctacgcgtatactcccttgcatcatatacgttcgtcaccagatcgtttgtttcggcctgaagttggtgcatatctctttcaacattcgacatgagatccttaagggccatatcgtctagattttgttgagatgttgctcctggatttggattttgttgtgctgttgtacatactgtaccaccagtaggtgtaggagtacatacagtggccacaataggaggttgagaaagtgtaaccgttggagtagtacaagaaatacttccatccgattgttgtgtacatgtagttgttggtaacgtctgagaaggttgggtagatggcggcgtcgtcgttttttgatctttattaaatttagagataatatcctgaacagcattgctcggcgtcaacgctggaaggagtgaactcgccggtgcatcagtatcttcagacagccaatcaaaaagattagacatatcagatgatgtattagtttgttgtcgtggttttggtgtaggaacagtactactaggtagaagaataggagccggtgtagctgttggaaccggctgtggagttatatgaatagttggttgtagcggttggataggctgtctgctggcgaccgtcatattatctctagctagttgttctcgcaactgtctttgataatacgactcttgagactttagtactatttcaatcgcttcatcctttttcgtatccggatcctttttttcagaataatagattgacgactttggtgtagaggattctgccagcccctgtgagaacttgttaaagaagtccatttaaggctttaaaattgaattgcgattataagattaaatggcagacacagacgatattatcgactatgaatccgatgatctcaccgaatacgaggatgatgaagaagaggaagaagatggagagtcactagaaactagtgatatagatcccaaatcttcttataagattgtagaatcagcatccactcatatagaagatgcgcattccaatcttaaacatatagggaatcatatatctgctcttaaacgacgctatactagacgtataagtctatttgaaatagcgggtataatagcagaaagctataacttgcttcaacgaggaagattacctctagtttcagaattttctgacgaaacgatgaagcaaaatatgctacatgtaattatacaagagatagaggagggttcttgtcctatagtcatcgaaaagaacggagaattgttgttggtaaacgattttgacaaagatggtctaaaattccatctagactatattatcaaaatttggaaacttcaaaaacgatattagaatttatacgaatatcgttctctaaatgtcacaatcaagtctctcatattcagcaggttattgtcgtactttatatcgtgttcattaacgatattttgcaaaatagtaatgattctatcttccttcgatagatattcttcagagattattgtcttatattctttcttgttatccgatatgaatttgataagactttgaacattattaatacccgtctgtttaattttttctacagatattttagttttggcagattctattgtgtctgttaatagacatccaacatcgacattcgacgtcaattgtctataaatcagagtataaattttagaaataacattagcaaattgttgtgcgttgatgtcgttattctgaaacagtatgattttaggtagcattttcttaacaaagagaacgtatttattgttactcagttgaacagatgatatatccagattactaacgcatctgattccatataccaaactttcagaagaaatggtgtacaattgtttgtattcattcaatgtctccttttcagaaattagtttagagtcgaatactgcaataattttcaagagatagttttcatcagataagattttatttagtgtagatatgataaaactattgttttgttggagaacttgatacgccgcgttctctgtagtcgacgctctcaaatgggaaacgatctccattatttttttggaatcggatactatatcttcggtatcttgacgcagtctagtatacatagagttaagagagattagagtttgtacattaagcaacatgtctctaaatgtggctacaaacttttcctttttcacataatctagtttattatataccgatttcacaacggcaccagatttaaggaaccagaatgaaaaactctgataactacaatatttcatcatagttacgattttattatcttctatagttggtgtaatagcgcatacctttttttccaagactggaaccaacgtcataaaaatgtttaaatcaaaatccatatcaacatctgatgcgctaagaccagtctcgcgttcaagattatttttactaatggtgacgaactcatcgtatagaactctaagtttgtccattatttatttacagatttagttgtttaatttatttgtgctcttccagagttgggatagtatttttctaacgtcagtattatattattaggatctacgttcatatgtatcataatattaatcatccacgttttgataaatctatctttagcttctgaaataacgtatttaaacaaaggagaaaaatatttagctacggcatcagacgcaataacattttttgtaaatgtaacgtatttagacgacagatcttcgttaaaaagttttccatctatgtagaatccatcagttgttaacaccattcccgcgtcagattgaataggagtttgaatagtttgttttggaaatagatccttcaataacttatagttgggtgggaaaaaatcgattttatcactagactctttcttttttactatcattacctcatgaactatttcttgaatgagtatatgtattttctttcctatatcggacgcgttcattggaaaatataccatgtcgttaactataagaatatttttatcctcgtttacaaactgaataatatcagatgtagttcgtaaacgaactatatcatcaccagcacaacatctaactatatgatatccactagtttcctttagtcgtttattatcttgttccatattagcagtcattccatcatttaagaaggcgtcaaagataatagggagaaatgacattttggattctgttacaactttaccaaaattaaggatatacggacttactatctttttctcaacgtcaatttgatgaacacacgatgaaaatgtacttcgatgagattgatcatgtagaaaacaacaagggatacaatatttccgcatatcatgaaatatattaagaaatcccaccttattatatttccccaaaggatccatgcatgtaaacattatgccgttatcattaataaagacttctttctcatcggatttgtaaaagttgttactgatttttttcattccaggatctagataattaataatgatgggttttctattcttattctttgtattttggcatatcctagaccagtaaacagtttccactttggtaaaatcagcagacttttgaacgctattaaacatggcattaatggcaataactaaaaatgtaaaatatttttctatgttaggaatatggtttttcactttaatagatatatggtttttggccaaaataatagatatttttttatccgaggatagtaaaatattattagtcgccgtctctataaaaataaagctagtctcgatatccaattttattctagaattgataggagtcgccaaatgtaccttatacgttatatctcccttgatgcgttccatttgtgtatctatatcggacacaagatctgtaaatagttttacgttattaatcatcacggtatcgccgtcgctagataacgctaatgtaccatccaagtcccaaatggagagatttaactgttcatcgtttagaataaaatgattaccggtcatattaataaagtgttcatcgtatctagataacaacgacttataattaatgtccaagtcttgaactcgctgaatgatcttttttaacccagttagttttagattggtacgaaatatattgttaaactttgattctacagtaatgtccaaatctagttgtggaaatacttccatcaacattgtttcaaacttgataatattattatctacatcttcgtacgatccaaattccggaatagatgtatcgcacgctctggccacccagataaccaaaaagtcacacgctccaggatatacattgtataaaaagctatcgttttttagtagtgtttttttctgagtatatacgaagggattaaaaatagtattatcaacgtaactatattccaaattattcttatgagaatagataataatatcgtccttaatatctaacaaatttcctaaatatccctttaattgagtcattcgaagcgtcaatagaatatgtctcttaactatttccggctgttgtatatttaaatgacttcgtaaaaaataatatatgggcgacttctcatctatgtaatcatatggagtgagatatagggctcgttctacctcctgccccttacccacctgtaataccaattgcggacttactatatatcgcatatttatatcgtggggtaaagtgaaaatctactaccgatgatgtaagtcttacaatgttcgaaccagtaccagatcttaatttggaggcctccgtagaactaggggaggtaaatatagatcaaacaacacctatgataaaggaaaatagcggttttatatcccgtagtagacgtctatttgcccatagatctaaggatgatgagagaaaactagcactacgattctttttacaaagactttattttttagatcatagagagattcattatttgttcagatgcgttgacgctgtaaaagacgtcactattaccaaaaaaaataacattatcgtggcgccttatatagcacttttaactatcgcatcaaaaggatgcaaacttacagaaacaatgattgaagcattctttccagaactatataatgaacatagtaagaaatttaaattcaactctcaagtatccatcatccaagaaaaactcggataccagtttggaaactatcacgtttatgattttgaaccgtattactctacagtagctctggctattcgagatgaacattcatctggcatttttaatatccgtcaagagagttatctggtaagttcattatctgaaataacatatagattttatctaattaatctaaaatctgatcttgttcaatggagtgctagtacgggcgctgtaattaatcaaatggtaaatactgtattgattacagtgtatgaaaagttacaactggtcatagaaaatgattcacaatttacatgttcattggctgtggaatcagaacttccaataaaattacttaaagatagaaatgaattatttacaaaattcattaacgagttaaaaaagaccagttcattcaagataagcaaacgcgataaggatacgctattaaaatattttacttaggactagagttagaatttatagacgactcatttcgtttatcattattactattattactaccatcattattagtattcttcttgttatcttgttcagaaatatacagcaatgctatgcctaatactaaatacattatcatgcttgcaatggctctaacaacgacgaaccaaaatgaatttggtcgtagcttttgttcacaaaaatacataaagaaatgtctacataaatctatggcgctattggctacttgaaatagcgccagtcctcctacagattttaatatagctgtataacatgacatttattcatcatcaaaagagacagagtcaccatctgtcatatttagattttttttcatgtgttcaaagtatcctctactcatttcattataatagtttatcatacttagaattttaggacggatcaatgagtaagacttaactagatcgtcagtagtaatttgtgcatcgtctattctgcatccgcttcgtcgaataatgtatagcatcgctttgagattctccatagctatcaagtctttatacaatgacatggaaatatctgtgaatactttatacttctccaacatcgatgccttaacatcatcgcctactttagcattgaaaatacgttctattgtgtagatggatgtaacaagatttttaaacaacaatgccattttacacgatgattgtctcaagtctccaatcttttgtttagaacgattagctacagagttcaacgcttggctgactagcatattattatctttagaaattgtattcttcaatgaagcgtttatcatatctgtgatttcgttagtcatattacagtctgactgggttgtaatgttatccaacatatcacctatggatacggtacacgtaccagcatttgtaataatcctatctaagatgttgtatggcattgcgcagaaaatatcttctcctgtaatatctccactctcgataaatctactcagattattcttaaatgccttattctctggagaaaagatatcagtgtccatcatttcattaatagtatacgcagaaaagataccacgagtatcaattctatccaagatacttatcggttccgagtcacagataatggtttcctctccttcgggagatcctgcatagaaatatctaggacaatagtttctatactgtctgtaactctgataatctctaaagtcactaactgataccatgaaattgagaagatcaaacgctgaagtaattaatttttctgcctcgtttttactacaactagttttcatcaatgtagtgacgatgtattgtttagttactcttggtctaatactgatgatagagatattattacttcccataatggatcttctagtagtcaccttaaagcccattgatgcaaatagcagatagataaagtcttggtatgactcctttctaatatagtacggactacctttgtcacccaactttatacccacataagccataacaacctctttaatagccgtttcatgaggtttatcagccatgagcctgagtagttggaagaatctcatgaatcccgtctcagaaagtcctatatgcatgatagatttatctttcctgggaaactctcgtatagtcatagatgaaatactcttcaaagtttctgaaataagattagtaacagtcttacctccgactactctaggtaacaaacaaactctaataggtgttttctctgcggagataatatcagaaaggatagagcaataagtagtattattgtgattataaagaccgaatacataacaggtagaatttataaacatcatgtcctgaaggtttttagacttgtattcctcgtaatccataccgtcccaaaacatggatttggtaactttgatagccgtagatctttgttccttcgccaacaggttaaagaaattaataaagaatttgtggtttctacctatgtctacaaattgcacgtttggaagcgtaactgttacgttcactgcagcattttgaggatttcgagtatgaagtacgatgttattgtttactggtatatctggaaagaattctaccagtctaggaataagagattgatatcgcatagaaatacaaaagttcataatctcatcatcgaagagcattttgttaccattgtaataaatatccactctgtcatatgtataaatgaagtactgttcaaacatgatgagatgtttatatgttggcatagtagtgagatctacgtttggtaatggtaatgtattaagattaactccataatgtctagcagcatctgcgatgttataagcgtcgtcaaagcggggtcgatcttgtattgttatatattgtctaacacctataagattatcaaaatcttgtctgcttaatacaccgttaacaatttttgccttgaattcttttattggtgcattaataacatccttatagaggatgttaaacaaataagtgttatcaaagttaagatctggatatttcttttctgctagaacatccattgagtcggagccatctggtttaatataaccaccgataaatctagctctgtattctgtatccgtcaatctaatattaagaaggtgttgagtgaaaggtggaagatcgtaaaagctgtgagtattaatgataggattagtttccgaactaatgttaattggggtattaataatatctatatttccagcgttaagtgtaacattaaacagttttaattcacttgacgtggtatcaattaaataattaatgcccaatttggatatagcagcctgaagctcatcttgtttagttacggatcctaatgagttattaagcaatatatcgaacggatgaacgaaggttgttttaagttggtcacatactttgtaatctagacatagatgcggaagaacggtagaaactatacgaaataaatattcagagtcctctaattgatcaagagtaactattgacttaataggcatcatttatttagtattaaatgacgaccgtaccagtgacggatatacaaaacgatttaattacagagttttcagaagataattatccatctaacaaaaattatgaaataactcttcgtcaaatgtctattctaactcacgttaacaacgtggtagatagagaacataatgccgccgtagtgtcatctccagaggaaatatcctcacaacttaatgaagatctatttccagatgatgattcaccggccactattatcgaacgagtacaacctcatactactattattgacgatactccacctcctacttttcgtagagagttattaatatcggaacaacgtcaacaacgagaaaaaagatttaatattacagtatcgaaaaatgctgaagcaataatggaatctagatctatgataacttctatgccaacacaaacaccatccttgggagtagtttatgataaagataaaagaattcagatgttagaggatgaagtggttaatcttagaaatcaacgatctaatacaaaatcatctgataatttagataattttaccaaaatactatttggtaagactccgtacaaatcaacagaagttaataagcgtatagctatcgttaattatgcaaatttgaacgggtcccccttatcagttgaggacttggatgtttgttcggaggatgaaatagatagaatctataaaacgattaaacaatatcacgaaagtagaaaacgaaaaattatcgtcactaacgtgattattattgtcataaacattatcgagcaggcattgctaaaactcggatttgaagaaatcaaaggactgagtaccgatatcacttcagaaattatcgatgtggagatcggagatgactgcgatgctgtagcatctaaactaggaatcggtaacagtccggttcttaatattgtattgtttatactcaagatattcgttaaacgaattaaaattatttaatttaatacattcccatatccagacaacaatcgtctggattaatctgttcctgtcgtctcataccggacgacatattaatctttttattagtgggcatctttttagatggtttctttttcccagcattaactgattcgatacctaaaagatcgtgattgatctctccgaccattccacgaacttctaattggccgtctctaacggtaccataaactattttaccagcattagtaacagcttggacaatctgaccatccattgcgttgaatgatgtagttgctgttgttctacgtctaggagcaccagaagtatttttggagcccttggaggctgatgtagaagaagacgaggattttgattttggtttacatgtaatacattttgaactctttgattttgtatcacatgcgccggcagtcacatctgtttgagaattaagattattgttgcctcctttgacggctgcatctccaccgatttgcgctagtagatttttaagctgtggtgtaatcttattaactgtttcgatataatcatcgtaactgcttctaacggctaaattttttttatccgccatttagaagctaaaaatatttttatttatgcagaagatttaactagattatacaatgaactaatatgatccttttccagattatttacaaacttggtatttcttggttctggaggaggcgaatttaaattcggacttggatttggattttgtgggttcttgatcttattatacagcgcatataggatggcgacggtaactgctacgcaaataccgatcaacaaaagaataccaatcatttattgacaataacttcactattgatcaagtatgcaatatatcatcttttcactaaataagtagtaataatgattcaacaatgtcgagatatatggacgataataatttagttcatggaaatatcgctatgattggtatgaatgactccactaactctgtggggcgcgcagtgctttccccacatagaataaattagcattccgactgtgataataataccaagtataaacgccataatactcaatactttccatgtacgagtgggactggtagacttactaaagtcaataaaggcgaagatacacgaaagaatcaaaagaatgattccagcgattagcacgccggaaaaataatttccaatcataagcatcatgtccatttaactaataaaaattttaaatcaccgaatgaacaaagtggaatataaaccatataaaaacaatagtttgtactgcaaaaataatatctatttttgttttcgaagatatggtaaaattaaatagtagtacacagcatgttataactaacagcagcaacggctcgtaattacttatcatttactagacgaaaaggtggtgggatattttcttgctcaaataatacaaatatatcacccatccattttatgcgatgtttatatactctaatctttaatagatctatagacgacgggtttaccaacaatatagattttatcgattcatctaatttaaacccttccttaaacgtgaatgatctattatctggcataacgatgactctacctgatgaatcggacaatgtactgggccatgtagaataaattatcaacgaattatcgtctacgaacatttatatcatttgttttaattttagtacgcgaataaatagatataaaatagaaaataacagatattacaaccaatgttatggccgcgcccaaccaggtaggcagttttattttatcttttactacaggttctcctggatgatgtacgttaccaactgcagacgtagttctagtacaattagacgtaagttccgcttgggaattttttaacgctaaagagttaacgttaatcgtacacccaacgtatttacatctagttctttgaacatcttgattataatataaccattttctatctctagattcgtcagtgcactcatgtaaccaacataccctaggtcctaaatatttatctccggaattagattttggataattcgcgcaccaacaatttctatttcctttatgatcgttacaaaagacgtataatgccgtatccccaaaagtaaaataatcaggacgaataattctaataaactcagaacaatatctcgcatccatatgtttggagcaaatatcggaataagtagacatagccggtttccgttttgcacgtaaccattctaaacaattggggtttccaggatcgtttctacaaaatccagtcatgaaatcatcacaatgttctgtcttgtaattattattaaatatttttggacagtgtttggtatttgtcttagaacaacattttgccacgctatcactatcgcccaggagataatccttttttataaaatgacatcgttgcccggatgctatataatcagtagcgtgttttaaatccttaatatattcaggagttacctcgttctgataatagattaatgatccaggacgaaatttgaaagaactacatggttctccatgaattaatacatattgtttagcaaattcaggaactataaaactactacaatgatctattgacataccatctatcaaacaaaatttgggtttaatttctcctggagacgtttcataataatacatataactttcttcggcaaacttaacagctctattatattcaggataattaaaacctaattccatatatttgtctcgtatatctgctattcctggtgctattttaattctattaagagtaacggctgcccccatttttaataatcgtcagtatttaaactgttaaatgttggtatatcaacatttaccttatttcccgcagtataaggtttgttgcaggtatactgttcaggaatggttacatttatacttcttctatagtcctgtctttcgatgttcatcacatatgcaaagaacagaataaacaaaataatgtaagaaataatattaaatatctgtgaatttgtaaatacattgattgccataataattacagcagctacaatacatacaatagacattcccacagtgttgccattacctccacgatacatttgagttactaagcaataggtaataactaagctagtaagaggcaatagaaaagatgagataaatatcatcaatatagagattagaggagggctatatagagccaagacgaacaaaatcaaaccgagtaacgttctaacatcattatttttgaagattcccaaataatcattcattcctccataatcgttttgcatcatacctccatctttaggcataaacgattgctgctgttcctctgtaaataaatctttatcaagcactccagcacccgcagagaagtcgtcaagcatattgtaatatcttaaataactcatttatatattaaaaaatgtcactattaaagatggagtataatctttatgccgaactaaaaaaaatgacttgtggtcaacccctaagtctttttaacgaagacggggattttgtagaagttgaaccgggatcatcctttaagtttctgatacctaagggattttacgcctctccttccgtaaagacgagtctagtatttgaaacattaacaacgaccgataataaaattactagtatcaatccaacaaatgcgccaaagttatatcctcttcaacgcaaagtcgtatctgaagtagtttctaatatgaggaaaatgatcgaatcaaaacgtcctctatacattactcttcacttggcgtgtggatttggtaagactattaccacgtgttatcttatggctacacacggtagaaaaaccgtcatttgcgtacccaataaaatgttaatacatcaatggaagacacaggtagaggcagtcggattggaacataagatatccatagatggagtaagtagtctattaaaggaactaaagactcaaagtccggatgtattaatagtagtcagtagacatctgacaaacgatgccttttgtaaatatatcaataagcattatgatttgttcatcttggatgaatcacatacgtataatctgatgaacaatacagcagttacaagatttttagcgtattatcctccgatgatgtgttattttttaactgctacacctagaccatctaacagaatttattgtaacagtattattaatattgccaagttatccgatctaaaaaaaactatctatgcagtagatagtttttttgagccatattccacagataatattagacatatgataaaacgattagatggaccatctaataaatatcatatatatactgagaagttattatctgtagacgagcctagaaatcaacttattcttgataccctggtagaagaattcaagtcaggaactattaatcgaattttagttattactaaactacgtgaacatatggtatttttctacaaacgattattagattttttcggatcagaggttgtatttataggagacgcccaaaatagacgtactccagatatggtcaaatcaatcaaggaactaaatagatttatattcgtatccaccttattttattccggtactggtttagatattcctagtttggattcgttgttcatttgctcggcagtaatcaacaatatgcaaatagagcaattactagggagggtatgtcgagaaacagaactattagataggacggtatatgtatttcctaacacatccatcaaagaaataaagtacatgataggaaatttcatgcaacgaattattagtctgtctgtagataaactaggatttaaacaagaaagttatcggaaacatcaagaatccgattccacttctgtatgtacaacatcctccagagaagaacgtgtattaaatagaatatttaactcgcaaaatcgttaagaagtttaagcgacgatccgcatgctgcgcaggccagtgtattacccctcatagtattaatataatccaatgatacttttgtgatgtcggaaatcttaaccaatttagactgacaggcagaacacgtcatgcaatcatcatcgtcatcgataactgtagtcttgggcttctttttgcggctcttcattccggaacgcacattggtgctatccatttaggtagtaaaaaataagtcagaatatgccctatagcacgatcgtgcaaaacctggtatatcgtctctatctttatcacaatatagtgtatcgacatttttattattattgacctcgtttatcttggaacatggaatggaaacatttttgttatcaacggccacttttgccttaattccagatgttgtaaaattataactaaacagtctatcatcgacacaaatgaaattcttgtttagacgtttgtagtttacgtatgcggctcgttcgcgtctcattttttcagatattgcaggtactataatattaaaaataagaatgaaataacataggattaaaaataaagttatcatgacttctagcgctgatttaactaacttaaaagaattacttagtctgtacaaaagtttgagattttcagattctgcggctatagaaaagtataattctttggtagaatggggaacatctacttactggaaaataggcgtgcaaaaggtagctaatgtcgagacgtcaatatctgattattatgatgaggtaaaaaataaaccgtttaatattgatccgggatattacattttcttaccgctatattttggaagcgtctttatttattcgaagggtaaaaatatggtagaacttggatctggaaactcttttcaaataccagataatatgcgaagtgcgtgtaacaaagtattagatagtgataacggaatagactttctgagatttgttttgttaaacaatagatggataatggaagatgctatatcaaaatatcagtctccagttaatatatttaaactagctagtgagtacggattaaacatacccaaatatttagaaattgaaatagaggaagacacattatttgacgacgagttatactctattatagaacgctcttttgatgataaatttccaaaaatatccatatcgtatattaagttgggagaacttaggcggcaagttgtagactttttcaaattctcattcatgtatattgagtccatcaaggtagatcgtataggagataatatttttattcctagcgttataacaaaattaggaaaaaagatattagtaaaagatgtagaccatttaatacgatctaaggttagagaacatacatttgtaaaagtaaaaaagaaaaacacattttccattttatacgactatgatgggaacggaacagaaactagaggagaagtaataaaacgaattatagacactataggacgagactattatgttaacggaaagtatttctctaaggttggtagtgcaggcttaaagcaattgactaataaattagatattaatgagtgcgcaactgtcgatgagttagttgatgagattaataaatccggaactgtaaaacgaaaaataaaaaaccaatcagcatttgatttaagcagagaatgtttgggatatccagaagcggattttataacgttagttaataacatgcggttcaaaatagaaaattgtaaggttgtaaatttcaatattgaaaatactaattgtttaaataacccgagtattgaaactatatatagaaactttaaccagttcgtctcaatctttaatgtcgtcaccgatgtcaaaaaaagattattcgagtgaaataatatgcgcctttgatataggtgcaaaaaatcctgccagaactgttttagaagtcaaggataactccgttagggtattggatatatcaaaattagactggagttctgattgggaaaggcgcatagctaaagatttgtcacaatatgaatacactacagttcttctagaacgtcagcctagaaggtcgccgtatgttaaatttatctattttattaaaggctttttatatcatacatcggctgccaaagttatttgcgtctcgcctgtcatgtctggtaattcatatagagatcgaaaaaagagatcggtcgaagcatttcttgattggatggacacattcggattgcgagactccgttccggatagacgcaaattagacgatgtagcggatagtttcaatttggctatgagatacgtattagataaatggaatactaattatacaccttataataggtgtaaatctagaaattacataaaaaaaatgtaataacgttagtaacgccattatggataatctatttacctttctacatgaaatagaagatagatatgccagaactatttttaactttcatctaataagttgcgatgaaataggagatatatatggtcttatgaaagaacgaatttcctcagaggatatgtttgataatatagtgtataataaagatatacatcatgccattaagaaactagtgtattgcgacatccaacttactaaacacattattaatcagaatacgtatccggtatttaacgattcttcacaagtgaaatgttgtcattatttcgacataaactcagataatagcaatattagctctcgtacagtagagatatttgagagggaaaagtcatctcttgtatcatatattaaaactaccaataagaagagaaaggtcaattacggcgaaataaagaaaactgttcatggaggcactaatgcaaattacttttccggtaaaaagtctgacgagtatctgagtactacagttagatccaacattaatcaaccttggatcaaaaccatctctaagaggatgagagttgatatcattaatcactctatagtaacgcgtggaaaaagctctatattacaaactatagaaattatttttactaatagaacatgtgtgaaaatattcaaggattctactatgcacattattctatccaaggacaaggatgaaaaggggtgtatacacatgattgacaaattattctatgtctattataatttatttctgttgttcgaggatatcatccaaaacgagtactttaaagaagtagctaatgttgtaaaccacgtactcacggctacggcattagatgagaaattattcctaattaagaaaatggctgaacacgatgtttatggagttagcaatttcaaaatagggatgtttaacctgacatttattaagtcgttggatcataccgttttcccctctctgttagatgaggatagcaaaataaagttttttaaggggaaaaagctcaatattgtagcattacgatctctggaggattgtataaattacgtgactaaatccgagaatatgatagaaatgatgaaggaaagatcgactattttaaatagcatagatatagaaacggaatcggtagatcgtctaaaagaattgcttctaaaatgaaaaaaaacactgattcagaaatggatcaacgactagggtataagtttttggtgcctgatcctaaagccggagttttttatagaccgttacatttccaatatgtatcgtattctaattttatattgcatcgattgcatgaaatcttgaccgtcaagcggccactcttatcgtttaagaataatacagaacgaattatgatagaaattagcaatgttaaagtgactcctccagattactcacctataatcgcgagtattaaaggtaagagttatgacgcattagccacgttcactgtaaatatctttaaagaggtaatgaccaaagagggtatatccatcactaaaataagtagttatgagggaaaagattctcatttgataaaaattccgctactaataggatacgggaataaaaatccacttgatacagccaagtatcttgttcctaatgtcataggtggagtctttatcaataaacaatctgtcgaaaaagtaggaattaatctagtagaaaagattacaacatggccaaaatttagggttgttaagccaaactcattcactttctcgttttcctccgtatcccctcctaatgtattaccgacaagatatcgccattacaagatatctctggatatatcacaattggaagcgttgaatatatcatcgacaaagacatttataacggtcaatattgttttgctgtctcaatatttatctagagtgagtctagaattcattagacgtagtttatcatacgatatgcctccagaagttgtctatctagtaaacgcgataatagatagtgctaaacgaattactgaatctattactgactttaatattgatacatacattaatgacctggtggaagctgaacacattaaacaaaaatctcagttaacgatcaacgagttcaaatatgaaatgctgcataactttttacctcatatgaactatacacccgatcaactaaagggattttatatgatatctttactaagaaagtttctctactgtatctaccacacttctagatatccagatagagattcgatggtttgtcatcgcatcctaacgtacggcaaatattttgagacgttggcacatgatgaattagagaattacataggcaacatccgaaacgatatcatgaacaatcacaagaacagaggcacttacgcggtaaacattcatgtactaacaactcccggacttaatcacgcgttttctagcttattgagtggaaagttcaaaaagtcagacggtagttatcgaacacatcctcactattcatggatgcagaatatttctattcctagaagtgttggattttatccggatcaagtaaagatttcaaaaatgttttctgtcagaaaataccatccaagtcaatatctttacttttgttcatcggacgttccggaaagaggtcctcaggtaggtttagtatctcaattgtctgtcttgagttccattacaaatatactaacgtctgagtatttggatttggaaaagaaaatttgtgagtatatcagatcatattataaagatgatataagttactttgaaacaggatttccaatcactatagaaaatgctctagttgcttctcttaatccaaatatgatatgtgattttgtaactgactttaaacgtagaaaacggatgggattcttcggtaacttggaggtaggtattactttagttagggatcacatgaatgaaattcgcattaatattggagcaggaagattagtcagaccattcttggttgtggataacggagagctcatgatggatgtgtgtccggagttagaaagcagattagacgacatgacattctctgacattcagaaagagtttccgcatgtcatcgaaatggtagatatagaacaatttacttttagtaacgtatgtgaatcggttcaaaaatttagaatgatgtcaaaggatgaaagaaagcaatacgatttatgtgactttcctgccgaatttagagatggatatgtagcatcttcactagtgggaatcaatcacaattctggacccagagctattcttggatgtgctcaagctaaacaagctatctcttgtctgagttcggatatacgaaataaaatagacaatggaattcatttgatgtatccagagaggccaattgtcattagtaaggctttagaaacttcaaagattgcggctaattgcttcggacaacatgttactatagcattaatgtcgtacaaaggtatcaatcaagaggatggaattatcatcaaaaaacaatttattcagagaggcggtctcgatattgttacagccaagaaacatcaagtagaaattccattggaaaactttaataacaaagaaagagataggtctaacgcctattcaaaattagaaagtaatggattagttagactgaatgctttcttggaatccggagacgctatggcacgaaatatctcatcaagaactcttgaagatgattttgctagagataatcagattagctttgatgtttccgaaaaatataccgatatgtacaaatctcgcgttgaacgagtacaagtagaacttactgacaaagttaaggtacgagtattaaccatgaaagaaagaagacccattctaggagacaaatttaccactagaacgagtcaaaagggaacagtcgcgtatgtcgcggatgaaacggaacttccatacgacgaaaatggtatcacaccagatgtcattattaattctacatccatcttctctagaaaaactatatctatgttgatagaggttattttaacagccgcatattctgctaagccgtacaacaataagggagaaaaccgacctgtctgttttcctagtagtaacgaaacatccatcgatacatatatgcaattcgctaaacaatgttatgagcatttaaattcgaaattgtccgatgaagaattgtcggataaaatcttttgtgaaaagattctctatgatcctgaaacggataagccttatgcatccaaagtattttttggaccaatttattacttgcgtctgagacatttaactcaggacaaggcaaccgttagatgtagaggtaaaaagacgaagctcattagacaagcgaatgagggacgaaaacgtggaggaggtattaagtttggagaaatggagagagactgtttaatagcgcatggcgcagccaatactattacagaagttttaaaagactcagaagaggattatcaagatgtgtatatttgtgaaaattgtggagacatagcagcacaaatcaaaagtattaatacatgtcttagatgttcaaaacttaatctctctcctctcttaacaaaaattgataccacgcacgtatctaaagtatttcttactcaaatgaacgccagaggcgtaaaagttaaattagatttcgaacgaaggcctccttcgttttataaaccattagataaagttgatctcaagccgtcttttctggtgtaatattctagtttggtagtagatacatatcaatatcatcaaattcgagatccgaattataaaatgggcgtggattgttaactatagaatcggtcgttatttcgtcggacgtctgatattcggaaatctgtggagtttcaggttttggtggaggtgtaactgctacttgggatactgaagtctgatattcagaaagctgggggatgttctggttcgacatccaccgatggtgtcacatcactaatcggtttggtaacgtctgtggatggaggtgctacttctacagaacctgtagcctcagttgtcaacggagatacattttcaatgcaaggaaatgtataatttggtaatggtttctcatgtggatctgaagaagaggtaagatatctactagaaagataccgatcacgttctagttctcttttgtagaacttaactttttctttctcagcatctagttgatattccaacctcttcacgttactacgttcagatttcaattcacgttcgcatgggttacctccgcagtttttacgagcgatttcacgttccagatcacgttcagccttcatgcgtctctccctctctctatcgagtttatcagagcagtctttctgaaggcgatcgaactccataaatttctccaacgctttgattgtttccatagatttccgaagttcagcttttaggactgtgattctttttcttttgaattcacagctggatgtacaaccgtttcctccgtttccattaccgccatctctaagtttcttttctagatcggcaatctttctcaacatttcatccccatgccttttacattcctcgagtctactgtcgtcgaaatatcgttccagctccttttcgacatcaataactttagcacgttgtctctcaagctctcttttgtagtaactatcatttttatctgattccctggcacgtttaagatcttcatgcaattgagtcagctcttaacacaatctcttaacttcctctcttgcttcttcgtcatagtacttacaatcactatgggatccattgttaccacgtctacactcggcgagctcgcgtttaagagattcaattttccgtttgtattggtccatgtctccattgctaccaccattagatttacaggctgctagttgtcgttcgagatcagaaatacgggttttcttgaattgatttcgtcgatgtacttggcatgattggcatcgaaacacttattaagttctttttccaattctacgattttatttctttcgcaagtcaattccctcctgtagtaactatctgttttgttagattcacgctctctacgtagactttcttgcaagttactaatttgttccctagcacgtccgagttcagttttatatgccgaatagagttctgattcatcctttgagcagatctctagcgatcgtttaagattcctgattctagtctttagcctatttacctcctcagaagatgttccgttaccgttgcgtttacactcgttaagctgtctatcaagatccatgattctatctctaagacgttgcatctctctttccatatcagcattgctttcattattacgtctgcagtcactcaactgtctttcaatatctgagattctatctctaagacgtcgcatctctctctgtttcggcattggtttcattattacgtctacagtcgttcaactgtctttcaagatctgatattctagattggagtctgctaatctctgtagcattttcacggcattcactcagttgtctttcaagatctgagattctagattggagtctgctaatctctgtaagatttcctcctccgctctcgatgcagtcggtcaacttattctctagttctctaatacgcgaacgcagtgcatcaacttcttgcgtgtcttcctggttgcgtgtacattcatcgagtctagattcgagatctctaacgcgtcgtcgttcttcctcaagttctctgcttactacagaaagcgtgtccctatcttgttgatatttagcaatttctgattctagagtactgattttgcttacgtagttactaatatttgtcttggccttatcaagatcctccttgtatttgtcgcattccttgatatccctacgaagtctggacagttcccattcgacattacgacgtttatcgatttcagctcggagatcgttatcgcgttgttttagccacatacgactgagttcaagttctcgttgacaagatccatctacttttccattcctaatagtatccagttccttttctagttctgaacgcatttctcgttccctatcaagcgattctctcaattctcggatagtcttcttatcaatttctaataaatctgaaccatcatctgtcccattttgaatatccctgtgttctttgatctcttttgtaagtcggtcgattctttcggttttataaacagaatccctttccaaagtcctaatcttactgagtttatcactaagttctgcatttaattcggtgagttttctcttggcttcttccaactctgttttaaactctccactatttccgcattcttcctcgcatttatctaaccattcaattagtttattaataactagttggtaatcagcgattcctatagccgttcttgtaattgtgggaacataattaggatcttctaatggattgtatggcttgatagcatcatctttatcattattagggggatggacaaccttaattggttggtcctcatctcctccagtagcgtgtggttcttcaataccagtgttagtaataggcttaggcaaatgcttgtcgtacgcgggcacttcctcatccatcaagtatttataatcgggttctacttcagaatattcttttctaagagacgcgacttcgggagttagtagaagaactctgtttctgtatctatcaacgctggaatcaatactcaagttaagaatagcgaatacctcatcgtcatcatccgtatcttctgaaacaccatcatatgacatttcatgaagtctaacgtattgataaatagaatcagatttagtattaaacagatccttaacctttttagtaaacgcatatgtatattttagatctccagatttcataatatgatcacatgccttaaatgtcagtgcttccatgatataatctggaacactaatgggtgacgaaaaagatacagcaccatatgctacgttgataaataaatctgaaccactaagtagataatgattaatgttaaggaagaggaaatattcagtatatagatatgccttagcatcatatcttgtactaaacacgctaaacagtttattgatgtgatcaatttccaacagaataattagagcagcgggaataccaacaaacatattaccacatccgtattttctatgaatatcacatattatgttaaaaaatcttgatagaagagcgaatatctcgtctgacttaatgagacgtagttcagcagcagcataagtcataactgtaaatagaacatactttcctgtagtgttgattctagactccacatcaacaccattattaaaaatagttttatatacatctttaatctgctctccgttaatcgtcgaacgttctagtatacggaaacactttgatttcttatctgtagttaatgacttagtgatatcacgaagaatattacgaattacatttcttgtttttcttgagagacctgattcaaaactcaactcatcgttccatagtttttttacctcagtggcgaaatctttggagtgcttggtacatttttcaataaggttcgtgacctccat

SEQ ID NO: 8 - DNA, 30000 bp, Horsepox virus
ctaagacgtcgcatctctctctgtttcggcattggtttcattattacgtctacagtcgttcaactgtctttcaagatctgatattctagattggagtctgctaatctctgtagcattttcacggcattcactcagttgtctttcaagatctgagattctagattggagtctgctaatctctgtaagatttcctcctccgctctcgatgcagtcggtcaacttattctctagttctctaatacgcgaacgcagtgcatcaacttcttgcgtgtcttcctggttgcgtgtacattcatcgagtctagattcgagatctctaacgcgtcgtcgttcttcctcaagttctctgcttactacagaaagcgtgtccctatcttgttgatatttagcaatttctgattctagagtactgattttgcttacgtagttactaatatttgtcttggccttatcaagatcctccttgtatttgtcgcattccttgatatccctacgaagtctggacagttcccattcgacattacgacgtttatcgatttcagctcggagatcgttatcgcgttgttttagccacatacgactgagttcaagttctcgttgacaagatccatctacttttccattcctaatagtatccagttccttttctagttctgaacgcatttctcgttccctatcaagcgattctctcaattctcggatagtcttcttatcaatttctaataaatctgaaccatcatctgtcccattttgaatatccctgtgttctttgatctcttttgtaagtcggtcgattctttcggttttataaacagaatccctttccaaagtcctaatcttactgagtttatcactaagttctgcatttaattcggtgagttttctcttggcttcttccaactctgttttaaactctccactatttccgcattcttcctcgcatttatctaaccattcaattagtttattaataactagttggtaatcagcgattcctatagccgttcttgtaattgtgggaacataattaggatcttctaatggattgtatggcttgatagcatcatctttatcattattagggggatggacaaccttaattggttggtcctcatctcctccagtagcgtgtggttcttcaataccagtgttagtaataggcttaggcaaatgcttgtcgtacgcgggcacttcctcatccatcaagtatttataatcgggttctacttcagaatattcttttctaagagacgcgacttcgggagttagtagaagaactctgtttctgtatctatcaacgctggaatcaatactcaagttaagaatagcgaatacctcatcgtcatcatccgtatcttctgaaacaccatcatatgacatttcatgaagtctaacgtattgataaatagaatcagatttagtattaaacagatccttaacctttttagtaaacgcatatgtatattttagatctccagatttcataatatgatcacatgccttaaatgtcagtgcttccatgatataatctggaacactaatgggtgacgaaaaagatacagcaccatatgctacgttgataaataaatctgaaccactaagtagataatgattaatgttaaggaagaggaaatattcagtatatagatatgccttagcatcatatcttgtactaaacacgctaaacagtttattgatgtgatcaatttccaacagaataattagagcagcgggaataccaacaaacatattaccacatccgtattttctatgaatatcacatattatgttaaaaaatcttgatagaagagcgaatatctcgtctgacttaatgagacgtagttcagcagcagcataagtcataactgtaaatagaacatactttcctgtagtgttgattctagactccacatcaacaccattattaaaaatagttttatatacatctttaatctgctctccgttaatcgtcgaacgttctagtatacggaaacactttgatttcttatctgtagttaatgacttagtgatatcacgaagaatattacgaattacatttcttgtttttcttgagagacctgattcaaaactcaactcatcgttccatagtttttttacctcagtggcgaaatctttggagtgcttggtacatttttcaataaggttcgtgacctccatttattataaaaaattttattcaaaacttaactacaatcgggtaattataaaatcgtagatctcccatgtggtggaatactaccatctatcgcatgtggatggacagtaggtaatggccatgggaacagtaatgtttgcatatttatctttcttgccagtattactgcatattgtcccaatgtttcgatgtgatgttctaacctatcaactgccgctgtatcacaacaatagtgtccgatggaattaagattatgatccaatgtgtttaatatatgattatcaagtcttatacgatccgcgtcttttttgacaggatcaggttcttctacaggaagaagtttcggcctcttatgatattcatgtctgggaaacggtggtctagggtgaggctccggtatcggagtgggttttggattataatcatcatcgtctatgacatcatcatcttcgacttcgatatttattttgctatcttgatgatgtcctgtatcagttgcattttcagcactcgactgaatattagcgcattcattgtctattattaccatatttctaaacccaaaatgtatgtgttgaacatcactactatcgttgatgagtcttatagcatgaattcgcttatcgttatcgggtttagcttctgtcaccttagcaattccttttttattaaactctacataatcatatccatttctattgtttgttctaatataaacgagtatagcatcattgctaaatttttcaatagtatcgaaaacagaatatcctaaaccatataatatatattcaggaacactcaaactaaatgtccaggattctcctaaatacgtaaactttaatagtgcgaaatcattcaaaaatctaccacttatagatagatagtacataaatgcgtatagtagtctacctatctctttattatgaaaaccggcattacgatcatatatgtcgtgatatacctgtgatccgtttacgttaaaccataaatacatgggtgatcctataaacatgaatttatttctaattctcagagctatagttaattgaccgtgtaatatttgcttacatgcatacttgatacgctcattaataagatttttatcattgctcgttatctcaggatcgtatatataaggagtaccatcgtgattcttaccagatattatacaaaatactatatataaaatatattgaccaacgttagtaatcatataaatgtttaacgttttaaattttgtattcaatgatccattatcatacgctagcatggttttatgatattcattctttaaaatataatattgtgttagccattgcattggggctcctaatggagattttttattctcatccattttaggataggctttcataaagtccctaataacttcgtgaataatgtttctatgttttctactgatgcatgtatttgcttcgatttttttatcccatgtttcatctatcatagatttaaacgcagtaatgctcgcaacattaacatcttgaaccgttggtacaattccgttccataaatttataatgttcgccatttatataactcattttttaaatatacttttaattgaacaaaagagttaagttactcatatggacgccgtccagtctgaacatcaatctttttagccagagatatcatagccgctcttagagtttcagcgtgattttccaacctaaatagaacttcatcgttgcgtttacaacacttttctatttgttcaaactttgttgttacattagtaatctttttttccaaattagttagccgttgtttgagagtttcctcattgtcgtcttcatcggctttaacaattgcttcgcgtttagcctctggctttttagcagcctttgtagaaaaaaattcagttgctggaattgcaagatcgtcatctccggggaaaagagttccgtccatttaaagtacagattttagaaactgacactctgcgttatttatatttggtacaacacatggattataaatatcgatgttaataacatcagaaaatgtaaagtctatacattgttgcatcgtgttaaattttctaatggatctagtattattgggtccaacttctgcctgaaatccaaatatggaagcggatacaaaaccgtttcctggataaaccacacatctccacttttgctttacatcagaaattgtgtcgttgacatcttgaactctcctatctaatgccggtgttccacctatagattttgaatattcgaatgctgcatgagtagcattaaattccttaatattgccataattttcatatattgagtaaccctggataaaaagtaaacacaccgcagccgtcgctaccacaataaaaaaaattgatagagagttcatttataatctattagaagctgacaaaatttttttacacgcatcagacaatgctttaataaatagttcaacatctacttttgtcatatcgaaccgatggtatgattctaacctagaattacatccgaaaaagttgactatgttcatagtcattaagtcattaacaaacaacattccagactctggattataagacgatactgtttcgtcacaattacctaccttaatcatgtgattatgaatattggctattagagcaccttctaagaaatctataatatctttgaaacacgatttaaaattaaaccacgaatatacttctacgaagaaagttagtttacccataggagaaataactataaatggagatctaaatacaaaatccggatctatgatagttttaacattattatattctctattaaatacctccacatctaaaaatgttaattttgaaactatgtcttcgtttattaccgtacctgaactaaacgctataagctctattgtttgagaactctttaaacgatattcttgaaatacatgtaacaaagtttcctttaactcggtcggtttatctaccatagttacagaatttgtatccttatctataatataataatcaaaatcgtataaagttatataattatcgcgttcagattgggatcttttcaaatagactaaaaaccccatttctctagtaagtatcttatgtatatgtttgtaaaatatcttcatggttggaatatgctctaccgcagttatccattcctcattgacagcggtagatgtattagacaaaactattccaatgtttaacaagggccattttacgagattattaaatccttgtttgataaatgtagccaatgagggttcgagttcaacgacgattgaattctcttcccgcggatgctgcatgatgaacgacgggatgttgttcgattgatttggaattctttttcgactttttgtttatattaaatattttaaaatttatagctgatagcaattcatgtactacggataatgtagacgcgtattgcgcatcgatatctttattattagataaatttatcaataaatgtgagaagtttgcctcgttaaggtcttccatttaaatattatataaacatttgtgtttgtaacttattcgtcttttatggaatagtttttaactagtaaagctgtaattacatactttgtccgtaaaacataaatataaacacccgcttttatcaaacgttccaaaaagtcgacagcggacatttttaacatggcatctattttaaatacacttaggtttttggaaaaaacatcattttataattgtaacaattcaataactaaagaaaagattaagattaaacataagggaatgtcatttgtattttataagccaaagcattctaccgttgttaaatacttgtctggaggaggtatatatcatgatgatttggttgtattggggaaggtaacaattaataatctaaagatgatgctattttacatggatttatcatatcatggagtgacaagtagtggagcaatttacaaattgggatcgtctatcgatagactttctctaaataggactattgttacaaaagttaataataattataataattataattattataattatgatgatacattttttgacgacgatgattgatcgctattgcacaattttgtttttgtactttctaatatagtgtttaggttctttttcatatgagaatattgatttactaaaatatctatgtttaacttttgttctataacgtccttatcggcggtatcggtacatatacgtaattcaccttcacaaaatacggagtcttcgataataatagccaatcgattattggatctagctgtctgtatcatattcaacatgtttaatatatcctttcgtttcccctttacaggcatcgatcgtagcatattttccgcgtctgagatggaaatgttaaaactacaaaaatgcgtaatgttagcccgtcctaatattggtacgtgtctataagtttggcatagtagaataatagacgtgtttaaatgccttccaaagtttaagaattctattagagtattgcattttgatagtttatcgcctacatcatcaaaaataagtaaaaagtgtgctgattttttatgattttgtgcgacagcaatacatttttctatgttacttttagttcgtatcagattatattctagagattcctgactactaacgaaattaatatgatttggccaaatgtatccatcataatctgggttataaacgggtgtaaacaagaatatatgtttatattttttaactagtgtagaaaacagagatagtaaatagatagtttttccagatccagatcctcccgttaaaaccattctaaacggcatttttaataaattttctcttgaaaattgtttttcttggaaacaattcataattatatttacagttactaaattaatttgataataaatcaaaatatggaaaactaaggtcgttagtagggaggagaacaaagaaggcacatcgtgacataaataacatttattatcatgatgacaccagaaaacgacgaagagcagacatctgtgttctccgctactgtttacggagacaaaattcagggaaagaataaacgcaaacgcgtgattggtctatgtattagaatatctatggttatttcactactatctatgattaccatgtccgcgtttctcatagtgcgcctaaatcaatgcatgtctgctaacgaggctgctattactgacgccgctgttgccgttgctgctgcatcatctactcatagaaaggttgcgtctagcactacacaatatgatcacaaagaaagctgtaatggtttatattaccagggttcttgttatatattacattcagactaccagttattctcggatgctaaagcaaattgcactgcggaatcatcaacactacccaataaatccgatgtcttgattacctggctcattgattatgttgaggatacatggggatctgatggtaatccaattacaaaaactacatccgattatcaagattctgatgtatcacaagaagttagaaagtatttttgtgttaaaacaatgaactaatatttatttttgtacattaataaatgaaatcgcttaatagacaaactgtaagtaggtttaagaagttgtcggtgccggccgctataatgatgatactctcaaccattattagtggcataggaacatttctgcattacaaagaagaactgatgcctagtgcttgcgccaatggatggatacaatacgataaacattgttatttagatactaacattaaaatgtctacagataatgcggtttatcagtgtcgtaaattacgagccagattgcctagaccggatactagacatctgagagtattgtttagtattttttataaagattattgggtaagtttaaaaaagaccaataataaatggttagatattaataatgataaagatatagatattagtaaattaacaaattttaaacaactaaacagtacgacggatgctgaagcgtgttatatatacaagtctggaaaactggttaaaacagtatgtaaaagtactcaatctgtactatgtgttaaaaaattctacaagtgacaacaaaaaatgaattaataataagtcgttaacgtacgccgccatggacgccgcgtttgttattactccaatgggtgtgttgactataacagatacattgtatgatgatttcgatatttcaatcatggactttataggaccatacattatatgtaacataaaaactgtccaaatagatgtacgggatataaaatattccgacatgcaaaaatgctactttagctataagggtaaaatagttcctcaggattctaatgatttggctagattcaacatttatagcatttgtgccgcatacagatcaaaaaataccatcatcatagcatgcgactatgatatcatgttagatatagaaggtaaacatcagccattttatctattcccatctattgatgtttttaacgctacaatcatagaagcgtataacctgtatacagctggagattatcatctaatcatcaatccttcagataatctgaaaatgaaattgtcgtttaattcctcattctgcatatcagacggcaatggatggatcataattgatgggaaatgcaatagtaattttttattataaaagttgtaaagtaaataataaaacaataaatattgaactagtagtacgtatattgagcaatcagaaatgatgctggtacctcttatcacggtgaccgtagttgcgggaacaatattagtatgttatatattatatatttgtaggaaaaagatacgtactgtctataatgacaataaaattatcatgacaaaattaaaaaagataaagagttctaattccagcaaatctagtaaatcaactgatagcgaatcagactgggaggatcactgtagtgctatggaacaaaacaatgacgtagataatatttctaggaatgagatattggacgatgatagcttcgctggtagtttaatatgggataacgaatccaatgttatggcgcctagcacagaacacatttacgatagtgttgctggaagcacgctgctaataaataatgatcgtaatgaacagactatttatcagaacactacagtagtaattaatgaaacggagactgttgaagtacttaatgaagataccaaacagaatcctaactattcatccaatcctttcgtaaattataataaaaccagtatttgtagcaagtcaaatccgtttattacagaacttaacaataaatttagtgagaataatccgtttagacgagcacatagcgatgattatcttaataagcaagaacaagatcatgaacatgaacacgatgatatagaatcatcggttgtatcattggtgtgattagtttcctttttataaaattgaagtaatatttagtattattgctgccgtcacgttgtacaaatggagatattccctgtattcggcatttctaaaattagcaattttattgctaataatgactgtagatattatatagatacagaacatcaaaaaattatatctgatgagatcaatagacagatggatgaaacggtacttcttaccaacatcttaagcgtagaagttgtaaatgacaatgagatgtaccatcttattcctcatagattatcgacgattatactctgtattagttctgtcggaggatgtgttatctctatagataatgacgtcaatggcaaaaatattctaacctttcccattgatcatgctgtaatcatatccccactgagtaaatgtgtcgtagttagcaagggtcctacaaccatattggttgttaaagcggatatacctagcaaacgattggtaacatcgtttacaaacgacatactatatgtaaacaatctgtcactgattaattatttgccgttgtctgtatttattattagacgagttaccgactatttggatagacacatatgcgatcagatatttgcgaataataagtggtattccattataaccatcgacaataagcagtttcctattccatcaaactgtataggtatgtcctctgccaagtacataaattctagcatcgatcaagatactttaatacatgtttgtaacctcgagcatccattcgacttagtatacaaaaaaatgcagtcgtacaattctgtacctatcaaggaacaaatattgtacggtagaattgataatataaatatgagcattagtatttctgtgtattaatagatttctagtatggggatcattaatcatctctaatctctaaatacctcataaaacgaaaaaaatactgctacaaatgaaaaaaaagctattatcaaatactgtacggaatggattcattctcttctctttttatgaaactctgttgtatatctactgataaaactggaagcaaaaaatctgataaaaagaataaaaataagatcaaggattatatggaacacgattattataaaataacaatagttcctggttcctcttccacgtctactagctcgtggtattatacacatgcctagtaatagtctctttgcgttgatggaaagcagactagaaataacaggctaaaatgttcagacaccataatagttcccaacccagataataacagagttccatcaacacattcctttaaactcaatcccaaacccaaaaccgttaaaatgtatccggccaattgatagtagataatgaggtgtacagcacatgataatttacacagtaaccaaaatgaaaacactttagtaattataagaaatatagacggtaatgtcatcatcaacaatccgataatatgcctgagagtaaacattgatggataaaacaaaaatgccccgcataactctatcatggcaataatacaaccaaacacttgtaaaattcctaaattagtagaaaatacaactgatatcgatgtataagcgatttcgaggaataataaaaacaaagtaatgcccgtaaagataaacatcaacattgtttggtaatcattaaaccaattagtatgacgttgaactaatttcacagtaaattttattccagtattatccccgcatgtatacgtacctggtaagatatctttatattctataatcaatgagacatcactatccgataacgaatgaagtctagcactagtatgccatttacttaatatggtcgtcttggaagttttattataagttaaaatatcatggttgtccaatttccatctaatatactttgtcggattatctatagtacacggaataatgatggtattattacatgctgtatactctatagtctttgtagatgttataatcataaaagtacagaggtatatcaacaatattctaactcttaacatttttatttatttaaaatgatacctttgttatttattttattctattttgctaacggtatcgaatggcataagtttgaaacgagtgaaaaaataatttctacttacttaatagatgacgtattatacacgggtgttaatgggggggcagtatatacattttcaaataataaactaaacaaaactggtttagctaatactaattatatcacaacatctataaaagtagagaatgaggatacattagtatgcggaaccaataacggaaatcccaaatgttggaaaatagacggttcagacgacccaaaacatagaggtagaggatacgctccttatagcaaagtaacgataatcagttacaacgaatgtgtactatctgacataaacatatcaaaagaaggaattaaacgatggagaagatttgacggaccatgtggttatgatttattcacggcggataacgtaattccaaaagatggtttacgaggagcattcgtcgataaagacggtacttatgacaaagtttacattcttttcactgatactatcggctcaaagagaattgttaaaattccgtatataacacaaatgtgcttaaacgacaaaggtggtccatcatcgttgtctagtcatagatggtcgacgtttttcaaagtcgaattagaatgtgacatcgacggaagaagttatagacaaattattcattctaaaactataaaaacagataatgatacgatactatatgtattcttcgatagtccttattccaagtccgcattatgtacctattctatgaataccattaaacaatctttttctacgtcaaaattggaaggatatacaaagcaattgccgtctccagctcctggtatatgtttaccagctggaaaagttgtttcacataccacgtttgacgttatagaacaatataatgtactagatgatattataaagcctttatctaaaccaacctatcttcgaaggaccgtctggcgttaaatggttcgatataaaggagaaggaaaatgaacatcgggaatatagaatatacttcataaaaaaaaattttatatattcattcgatacaaaaactaaacaaactcgcagtgcacaagtcaatgcacaactattttcagtaatggtaactgcgaaaccgttatttatagcagatatagggataggagtaggaatgccacgaatgaaaaaatacttaaaatgtaatcttaattcgagtacaccacacgacaatgaacaaacctaagacagattatgctggttatgcttgctgcgtaatatgcggtttaattgtcgaaattatttttacagcgacactattaaaagttgtagaacgtaaattagttcatacaccatcaatagataaaacgataaaagatgcatatattagagaagattgtcctactgactggataagctataataataaatgtatacatttatctactaatcaaaaaacctgggaggaaggacgtaatacatgcaaagctctaaatccaaattcggatctaattaagatagagactccaaacgagttaagttttttaagaagccttagacgaggctattgggtaggagaatccgaaatattaaaccagacaaccccatataattttatagctaaaaatgccacgaagaatggaactaaacatatgaacggaactaaaaaacggaaatatatttgtagtacaacgaatactcccaaactgcattcgtgttacactatataacaattacactacatttttatcataacactacttcggttagatgttttagaaaaaaataaatattgccgtactgttcttgtttttataaaaataacaattaacaattatcaaattttttctttaatattttacgtggttgaccattcttggtggtaaaataatctcttagtgttggaatggaatgctgtttaatgtttccacactcatcgtatattttgacgtatgtagtcacatcgtttacgcaatagtcagactgtagttctatcatgcttcctacattagaaggaggaacagttttaaagtctcttggttttaatctattaccgttagttttcatgaaatcctttgttttatccacttcacattttaaataaatgtccactatacattcttttgttaattttactagatcgtcatgggtcatagaatttataggttccgtagtccatggatccaaactagcaaacttcgcgtatacggtatcgcgattagtgtatacaccaactgtatgaaaattaagaaaacagtttaatagatcaacagaaatatttaatcctccgtttgatacagatgcaccatatttatggattttggattcacacgttgtttgtctgaggggttcgtctagcgttgcttctacataaacttctattcccatatattctttattgtcagaatcgcataccgatttatcatcatacactgtttgaaaactaaatggtatacacatcaaaataacaaatactaacgagtacattctgcaatattgttatcgtaattggaaaattagtgttcgagtgagtcggattatgtgagtactggattgtatattttattttatattttatattttgtaataagaataaaatgctaatgtcaagtttattccaatagatgtcttattaaaaacatatataataaataacaatggctgaatggcataaaattatcgaggatatctcaaaaaataataagtttgaggatgccgccatcgttgattacaagactacaaagaatgttctagcggctattcctaacagaacatttgcaaagattaatccgggtgaagttattccgctcatcactaatcataatattctaaaacctcttattggtcagaaattttgtattgtatatactaactctctaatggacgagaacacgtatgctatggagttgcttactgggtacgcccctgtatctccgatcgttatagcgagaactcataccgcacttatatttttgatgggtaagccaacaacatccagacgtgatgtgtatagaacgtgtagagatcacgctacccgtgtacgcgcaactggtaattaaaataaaaagtaatattcatatgtagtgtcaattttaaatgatgatgaaatggataatatccatattgacgatgttaataatgccggtattggcatacagttcatcgatttttagatttcattcaaaggatgtggaattatgttatgggaatttgtattttgataggatctataataatgtagtaaatataaaatatattcctgagcatattccatatagatataattttattaatcgcgcgttctccgtagatgaactagacgataatgtcttttttacacatggttattttttaaaacacaaatatggttcacttaatcctagtttgattgtctcattatcaggaaacttaaaatataatgatatacaatgctcagtaaatgtattgtgtctcattaaaaatttggcaacgagtacatctactatattaacatctaaacacaaaacgtattctctacatcggtccaagtgtattattataataggatatgattctattatatggtataaagatataaatgacaagtataatggcatctatgattttactgcaatatgtatgctaatagcgtctacattgatagtgaccatatacgtgtttaaaaaaataaaaatgaactcttaattatgctatgctattagaaatggataaaatcaaaattacggttgattcaaaaattggtaatgttgttaccatatcgtataacttggaaaagataactattgatgttacaccaaaaaagaaaaggatgtattattagcgcaatcagttgctgtcgaagaggcaaaagatgtcaaggtggaagaaaaaaatattatcgatattgaagatgacgatgatatggatgtaaaaagcgcgtaatactatctataaacataagtatataataaatactttttatttacggtactcttgtagtggtgataccctactcaattatttttttaaaaaaatacttattctgattcttctagccatttccgtgttcgttcgaatgccacatcgacgttaaagataggggagtagttgaaatctagttctgcattgttggtacgcaccttaaatgtagtgttggatatcttcaacgtatagttgttgagtagtgatggttttctaaatagaattctcttcatatcattcttgcacgcgtacatttttagcatccatcttggaatcctagatccttgttctattcccaatggtttcatcaatagaagattaaacatatcgtacgaacacgatggagagtaatcgtagcaaaagtaagcatttcctttaatctcagatcccggatactggatatattttgcagccaacacgtgcatccatgcagcatttcctacatatacccggctatgtaccgcgttatcatcgactgtacgatacataatgttaccgtgttgcttacattgctcgtaaaagactttcgtcaatttgtctccttctccgtaaattccagtgggtcttaggcaacaagtatacaattttgctccattcatgattacggaattattggctttcataaccagttgctcggccatacgtttactttttgcgtatacatgtcctggtgatatatcataaagggtatgctcatggccgatgaatggatcaccgtgtttattgggtcctattgcttccatgctactagtatagatcaaatacttgattcctaggtccacacaagctgccaaaatagtctgtgttccataatagtttactttcatgatttcattatcggtgtattttccaaatacatccactagagcagctgtatgaataatcagatttaccccatttagcgcttctcttaccttatcaaagtcgtttatatcacattgtatatagtttataaccttaaccttcgaggttattggttgtggatcttctacaatatctatgactctgatttcttgaacatcatctgcactaattaaaagttttactatatacctgcctagaaatccggcaccaccagtaaccgcgtacacggccattgctgccactcataatatcaaactacttattctattttactaaataatggctgtttgtataatagaccacgataatatcagaggagttatttactttgaaccagttcatggaaaagataaagttttaggatcagttattggattaaaatccggaacgtatagtttgataattcatcgttacggagatattagtcaaggatgtgattccataggcagtccagaaatatttatcggtaacatctttgtaaacagatatggtgtagcatatgtttatttagatacagatgtaaatatatttacaattattggaaaggcgttatctatttcaaaaaatgatcagagattagcgtgtggagttattggtatttcttacataaatgaaaagataatacattttcttacaattaacgagaatggcgtttgatatatcagttaatgcgtctaaaacaataaatgcattagtttacttttctactcagcaaaataaattagtcatacgtaatgaagttaatgatacacactacactgtcgaatttgatagggacaaagtagttgacacgtttatttcatataatagacataatgacaccatagagataagaggggtgcttccagaggaaactaatattggttgcgcggttaatacgccggttagtatgacttacttgtataataagtatagttttaaactgattttagcagaatatataagacacagaaatactatatccggcaatatttattcggcattgatgacactagatgatttggctattaaacagtatggagacattgatctattatttaatgagaaacttaaagtagactccgattcgggactatttgactttgtcaactttgtaaaggatatgatatgttgtgattctagaatagtagtagctctatctagtctagtatctaaacattgggaattgacaaataaaaagtataggtgtatggcattagccgaacatatatctgatagtattccaatatctgagctatctagactacgatacaatctatgtaagtatctacgcggacacactgagagcatagaggataaatttgattattttgaagacgatgattcgtctacatgttctgccgtaaccgacagggaaacggatgtataatttttttatagcgtgaaggatatgataaaaaatataattgttgtatttatcccattccaatcaccttatatgattctgtaaaaaaattatactgtaacacaatgaaggagtcttatagatgtatagaggtcagatactggtttgataaactgtttattccacataagtatgtttgactttatggttaaacccgcatactttaacaaatcactgaaaattggagttaggtattgacctctcagaatcagttgccgttctggaacattaaatgtattttttatgatatactccaacgcatttatgtgggcatacaacaagtcattactaatggagtattccaagagttttagttgtctagtatttaacaagagaagagatttcaacagactgtttatgaactcgaatgccgcctcattgtcgcttatattgatgatgtcgaattctcccaatatcatcaccgatgagtagcttatcttgttatcgggatccaagttttctaaagatgtcattaaaccctcgatcatgaatggatttatcatcatcgtttttatgttggacatgagcttagtccgtttgtccacatctatagacgacgatttctgaattatttcatatatccctctctttaactccaggaacttgtcaggatggtctactttaatatgttctcgtctaagagatgaaaatctttggatggttgcacgcgacttttctctaaaggatgacgttgcccaagatcctctcttaaatgaatccatcttatccttggacaagatggacagtctattttccttagatggtttaatatttttgttacccatgatctataaaggtagacctaatcgtctcggatgaccatatatttattttcagttttattatacgcataaattgtaaaaaatatgttaggtttacaaaaatgtctcgtggggcattaatcgtttttgaaggattggacaaatctggaaaaacaacacaatgtatgaacatcatggaatctataccggcaaacacgataaaatatcttaactttcctcagagatccactgtcactggaaagatgatagatgactatctaactcgtaaaaaaacctataatgatcatatagttaatctattattttgtgcaaatagatgggagtttgcatcttttatacaagaacaactagaacagggaattactttaatagttgatagatacgcattctctggagtagcgtatgccgccgctaaaggcgcgtcaatgactctcagtaagagttatgaatctggattgcctaaacccgacttagttatattcttggaatctggtagcaaagaaattaatagaaacgtcggcgaggaaatttatgaagatgttacattccaacaaaaggtattacaagaatataaaaaaatgattgaagaaggagatattcattggcaaattatttcttctgaattcgaggaagatgtaaagaaggagttgattaagaatatagttatagaggctatacacacggttactggaccagtggggcaactgtggatgtaatagtgaaattacattttttataaatagatgttagtacagtgttataaatggatgaagcatattactctggcaacttggaatcagtactcggatacgtgtccaatatgcataccgaactcgtatcaatatctcaattagttattgccaagatagaaactatagataatgatatattaaacaaggacattgtaaattttatcatgtgtagatcaaacttggataatccatttatctctttcctagatactgtatatactattatagatcaagagaactatcagactgagttgattaattcattagacgacaatgaaattatcgattgtatagttaataagtttatgagcttttataaggataacctagaaaatatagtagatgctatcatcactctaaaatatataatgaataatccagattttaaaactacgtatgtagaagtactcggttccaaaatagcggatatagatattaaacaagtgatacgtgagaatatactacaattgtctaatgatatccgcgaacgatatttgtgaaaatattaaaaaaaaatactttttttattaaatgacgtcttttcgtgaatttagaaaattatgctgtgctatatatcacgcatcaggatataaagaaaaatctaaattaattagagactttataacagatagggatgataaatatttgatcattaagctattgcttcccggattagacgatagaatttataacatgaacgataaacaaattataaaattatatagtataatatttaaacaatctcaggaagatatgctacaagatttaggatacggatatataggagacactattagtacattcttcaaagaaaacacagaaatccgtccaagagataaaagcattttaactttagaagacgtggatagtttcttaactacgttatcatccgtaactaaagaattgcatcaaataaaattattgactgatgtagcatctgtttgtacatgtaatgatttaaaatgtgtagtcatgcttattgataaagatctaaaaattaaagcgggccctcggtacgtacttaacgctattagtcctcatgcctatgatgtttttagaaaatctaataacttgaaagagataatagaaaattcatctaaacaaaatctagactttatatctatttctgttatgactccaattaatcccatgttagcggaatcgtgtgattctgtcaataaggcgtttaaaaaatttccatcaggaatgtttgcggaagttaaatacgatggtgaaagagtacaagttcataaaaataataacgagtttgccttctttagtagaaacatgaaaccagtactctctcataaagtggattatctcaaagaatacataccgaaagcatttaaaaaagctacgtctatcgtattggattctgaaattgttcttgtagacgaacataatgtaccgctcccgtttggaagtttaggtatacacaaaaaaaaagaatataaaaactctaacatgtgtttgttcgtgtttgactgtttgtactttgatggattcgatatgacggacattccattgtacgaacgaagatcttttctcaaagatgttatggttgaaatacccaatagaatagtattctcagagttgacgaatattagtaacgagtctcagttaactgacgtattggatgatgcactaacgagaaaattagaaggattggtcttaaaagatattaatggagtatacgaaccgggaaagagaagatggttaaaaataaagcgagactatttgaacgagggttccatggcagattctgccgatttagtagtactaggtgcttactatggtaaaggagcaaagggtggtatcatggcagtctttctaatgggttgttacgacgatgaatccggtaaatggaagacggttaccaagtgttcaggacacgatgataatacgttaaggaagttgcaagaccaattaaagatgattaaaattaacaaggatcccaaaaaaattccagagtggttagtagttaataaaatctatattcccgattttgtagtagaggatccaaaacaatctcagatatgggaaatttcaggagcagagtttacatcttccaagtcccataccgcaaatggaatatccattagatttcctagatttactaggataagagaggataaaacgtggaaagaatctactcatttaaacgatttagtaaacttgactaaatcttaatagttacatacaaactaaaaattaaaataacactatttagttggtggtcgccatggatggtgttattgtatactgtctaaacgcgctagtaaaacatggcgaggaaataaatcatataaaaaatgatttcatgattaaaccatgttgtgaaagagtttgtgaaaaagttaagaacgtttacatcgacggacaatctaaaaacaatacagtgattgcagatttgccatatctggataatgctgtatcggatgtatgcaaatatatatatagtatcaagaatatccagatttgctaatttgataaagatagatgacgatgacaagactcctactggtgtatataattattttaaacctaaagatgccattcctgttattatatccataggaaaggatagagatgtttgtgaactattaatttcatctgataaagcgtgtgcgtgtatagagttaaattcatataaagtagccattcttcccatggatgtttccttttttaccaaaggaaatgcatcattgattattctcctgtttgatttctctatcgatgcggcacctctcttaagaagtgtaaccgataataatgttattatatctagacaccagcgtctacatgacgagcttccgagttccaattggttcaagttttacataagtataaagtccgactattgttctatattatatatggttgttgatggatctgtgatgcatgcaatagctgataatagaacttacgcaaatattagcaaaaatatattagacaatactacaattaacgatgagtgtagatgctgttattttgaaccacagattaggattcttgatagagatgagatgctcaatggatcatcgtgtgatatgaacagacattgtattatgatgaatttacctgatgtaggcaaatttggatctagtatgttggggaaatatgaacctgacatgattaagattgctcttttggtggctggtaatttaataagaaatcgagactacattcccgggagacgaggctatagctactacgtttacggtatagcctctagataatttttttaagcacgaaataaaaaacataattttaaaccaatctattttatactattttgtgtaatcaccatggacataaagatagatattagtatttttggtgataaatttacggtgactactaggagggaaaatgaagaaagaaaaaaatatctacctctccaaaaagaaaaaactactgatgttatcaaacctgattatcttgagtacgatgacttgttagatagagatgagatgtttactattctagaggaatattttatgtacagaggtctattaggcctcagaataaaatatggacgactctttaacgaaattaaaaaattcgacaatgatgcggaagaacaattcggtactatagaagaactcaagcataaacttagattaaattctgaagagggagcagataactttatagattatataaaggtacaaaaacaggatatcgtcaaacttactgtatacgattgcatatctatgataggattgtgtgcatgcgtggtagatgtttggagaaatgagaaactgttttctagatggaaatattgtttacgagctattaaactgtttattaatgatcacatgcttgataagataaaatctatactgcagaatagactagtgtatgtggaaatgtcatagaaagttaaaagttaatgagagcaaaaatatataaggttgtattccatatttgttattttttctgtaatagttaaaaaatacattcgatggtctatctatcagattattatgtgttataaggtactttttctcataataaactagagtatgagtaagatagtgtttttcaaaacatataaatctaaaattgatggatgagatatacagctattaatttcgaaaatatattttaatctgataactttaaacatggatttttgatggtggtttaacgttttaaaaaaagattttgttattgtagtatatgataatattaaaagatggatataaagaatttgctgactgcatgtactattttttacattactacattggctacggcagatatacctactccgccaccacacgctccggtaaacgggtcatgtgacaagggagaatatcttgataagaggcataatcaatgttgtaatcggtgtccacctggagaatttgccaaggttagatgtaatggtaacgataacacaaaatgtgaacgctgcccacctcatacatataccgcaatcccaattattctaatggatgtcatcaatgtagaaaatgcccaaccggatcatttgataaggtaaagtgtaccggaacacagaacagtaaatgttcgtgtcttcctggttggtattgcgctactgattcttcacagactgaagattgttgaaattgtgtaccaaaaaggagatgtccatgcggatactttggtggaatagatgaacaaggaaatcctatttgtaaatcgtgctgtattggtgaatattgcaactacctacgtaattatagacttgatccattttctccatgcaaactatctaaatgtaattaattatgattatgattatgattttgattttgattttgatgataatgttaccatacattatatcgctacttggttagtgtattattcagtatgaagacctattaataattacttatcttttgacgatcttgttataattataatataaaaacttatggcatagtaacttataattgctaacacgataaattcgtaataatctgttttgttcaaatttttataaggaatctacaggcataaaaataaaaatataatctataatatactcttacaacgccatcatgaatagcagcagtaaattaattgctgttattaatggatttagaaatagtggacgattttgtgatattaatatagttattaatgatgaaaggataaacgctcataaactcatcctatctggagcctccgaatatttttccattctgttttccaataattttatcgattctaatgaatacgaagttaatctaagtcatttagattatcaaagcgtaaacgatttgatcgattatatttatgggatacctttgagcctaactaacgataacgtgaaatatattctttcaaccgctgattttttacaaattggatctgctattacggagtgtgaaaattacatacttaaaaatctttgttctaaaaactgtatcgatttctacatatacgctgataaatataataacaagaaaatagaatcagcgtcgtttaacacaatattacaaaatattttgagactcatcaacgatgaaaactttaaatacttaacagaggaatcaatgataaaaattttaagcgatgatatgttaaatataaaaaatgaggatttcgccccactaattctcattaaatggttagagagtactcaacaaccatgcaccgtcgagttacttaaatgcctcagaatatcattgctttccccacaagttataaaatcactttatagtcatcgactggttagttcaatctacgaatgtataacattcttaaacaatatagcattcttggatgaatcatttcctagataccatagcatcgagttgatatctatcggtataagtaattcgcgtgataaaatttccataaactgctacaatcataaaaaaaatacatgggaaatgatatcttcacgtagatataggtgtagtttcgcagtggccgtcctggataatattatttatatgatgggtggatatgatcagtccccgtatagaagttcaaaggttatagcgtacaatacatgtacaaattcttggatatatgatataccagagctaaaatatcctcgttctaattgtgggggactggctgatgacgaatacatttattgtataggcggcatacgcgatcaggattcatcgttgacatctagtattgataaatggaagccatcaaaaccatattggcagaagtatgctaaaatgcgcgaaccaaaatgtgatatgggggttgcgatgttaaacggattaatatatgttataggtggaatcgttaaaggtgacacgtgtaccgacgcactagagagtttatcagaagatggatggatgaagcatcaacgtcttccaataaaaatgtccaatatgtcgacgattgttcatgatggcaagatttatatatctggaggttacaacaatagtagtgtagttaatgtaatatcgaatctagtccttagctataattcgatatatgatgaatggaccaaattatcatcattaaatattcctagaattaatcccgctctatggtcaacgcataataaattatatgtaggaggaggaatatctgatgatgttcgaactaatacatctgaaacatacgataaagaaaaagattgttggacattggataatggtcacgtgttaccacgcaattatataatgtataaatgcgaaccgattaaacataaatatccattggaaaaaacacagtacacgaatgattttctaaagtatttggaaagttttataggtagttgatagaacaaaatacataattttgtaaaaataaatcactttttatactaatatgacacgattaccaatacttttgttactaatatcattagtatacgctacaccttttcctcagacatctaaaaaaataggtgatgatgcaactctatcatgtaatcgaaataatacaaatgactacgttgttatgagtgcttggtataaggagcccaattccattattcttttagctgctaaaagcgacgtcttgtattttgataattataccaaggataaaatatcttacgactctccatacgatgatctagttacaactatcacaattaaatcattgactgctagagatgccggtacttatgtatgtgcattctttatgtcatcaactacaaatgacactgataaagtagattatgaagaatactccacagagttgattgtaaatacagatagtgaatcgactatagacataatactatctggatctacacattcaccagaaactagttctgagaaaccagaggatatagataattttaattgctcgtcggtattcgaaatcgcgactccggaaccaattactgataatgtagaagatcatacagacaccgtcacatacactagtgatagcattaatacagtaagtgcaacatctggagaatccacaacagacgagactccggaaccaattactgataaagaagatcatacagttacagacactgtctcatacactacagtaagtacatcatctggaattgtcactactaaatcaaccaccgatgatgcggatctttatgatacgtacaatgataatgatacagtaccatcaactactgtaggtagtagtacaacctctattagcaattataaaaccaaggactttgtagaaatatttggtattaccgcattaattatattgtcggccgtggcaatattctgtattacgtattatatatgtaataaacgttcacgtaaatacaaaacagagaacaaagtctagatttttgacttacataaatgtctgggatagtaaaatctatcatattgagcggaccatctggtttaggaaagacagccatagccaaaagactgttaaaagactatgggaatatatttggatttgtggtgtcccataccactagatttcctcgtcctatggaacgagaaggtgtctattaccattacgttaacagagaggccatctgaaagggaatagccgccggaaactttctagaacatactgagtttttaggaaatatttacggaacttctaaaacagctgtgaatacagcggctattaataatcgtatttgtgtgatggatttaaacatcgacggtgttagaagttttaaaaatacttacctaatgccttactcggtgtatataagacctacctctcttaaaatggttgagaccaagcttcgttgtagaaacactgaagctaacgatgagattcatcgtcgtgtgatattggcaaaaacggatatggatgaggccaacgaagcaggtctattcgacactattattattgaagatgatgtgaatttagcatatagtaagttaattcagatactacaggaccgtattagaatgtattttaacactaattaaagacttaagacttaaaacttgataattaataatataactcgtttttatatgtgtctatttcaacgtctaatgtattagttaaatattaaaacttaccacgtaaaacttaaaatttaaaatggtatttcattgacagatagatcacacattatgaactttcaaggacttgtgttaactgacaattgcaaaaatcaatgggtcgttggaccattaataggaaaaggtggatttggtagtatttatactactaatgacaataattatgtagtaaaaatagagcccaaagctaacggatcattatttaccgaacaggcattttatactagagtacttaaaccatccgttatcgaagaatggaaaaaatctcacaatataaagcacgtaggtcttattacgtgcaaggcatttggtctatacaaatccattaatgtggaatatagattcttggtaattaatagattaggtgcagatctagatgcggtgatcagagccaataataatagactaccaaaaaggtcggtgatgttgatcggaatcgaaatcttaaataccatacaatttatgcacgagcaaggatattctcacggagatattaaagcgagtaatatagtcttagatcaaatagataagaataaattatatctagtggattacggattggtttctaaattcatgtctaacggcgaacatgttccatttataagaaatccaaataaaatggataacggtactctagaatttacacctatagattctcataaaggatacgttgtatctagacgtggagatctagaaacacttggatattgtatgattagatggttgggaggtatcttaccatggactaagatatctgaaacaaagaattgtgcattagtaagtgccacaaaacagaaatatgttaacaatactgcaactttgttaatgaccagtttgcaatatgcacctagagaattgctgcaatatattaccatggtaaactctttgacatattttgaggaacccaattacgacaagtttcggcacatattaatgcagggtgtatattattaagtgtggtgtttggttgatgtaaaatttttgttgataaaaattaaaaaaataacttaatttattattgatctcgtgtgtacaaccaaaatcatggcgatgttttacgcacacgctctcggtgggtacgacgaaaatcttcatgcctttcctggaatatcatcgactgttgccaatgatgtcagaaaatattctgttgtgttagtttataataacaagtatgacattgtaaaagacaaatatatgtggtgttacagtcaggtgaacaagagatatattggagcactgttgcctatgtttgagtgcaatgaatatctacaaattggagatccgatccatgatcaagaaggaaatcaaatttctatcatcacataccgccacaaaaactactatgctctaagcggaatcgggtacgagagtctagacttgtgcttggaaggagtaaggattcatcatcacacacttgaagcaggaaacgctgtatatggaaaagttcaacatgattattctactatcaaagagaaggccaaagaaatgaatgcactcagttcaggacttatcatcgattaccacgtctggataggagattgtatctgtcaagttactgctgtagacgtacatggaaaggaaattatgagaatgagattcaaaaagggtgcggtgcttccgatcccaaatctggtaaaagttaaacttggggagaatgatacagaaaatctttcttctactatatcggcggcgccatcgaggtaaccacctctctggaagacagcgtgaataatgtactcatgaaacgtttggaaactatacgccatatgtggtctgttgtatatgatcattttgatattgtgaatggtaaagaatgctgttatgtgcatacgcatttgtctaatcaaaatcttataccgagtactgtaaaaacaaatttgtacatgaagactatgggatcatgcattcaaatggattccatggaagctctagagtatcttagcgaactgaaggaatcaggtggatggagtcccagaccagaaatgcaggaatttgaatatccagatggagtggaagacactgaattaattgagagattggtagaggagttcttcaatagatcaaaacttcaggctggtaaattagtcaaatttggtaattctattaattgttaaacatacatctgtttcagctaagcaactaagaacacgtatacggcagcagcttccttttatactctcatcttttaccaacacaaagggtggatatttgttcattggagttgataataatacacacaaagtatttggattcacggtgggttacgactacctcagactggta

SEQ ID NO: 9 - DNA, 28754 bp, Horsepox virus
atggcgatgttttacgcacacgctctcggtgggtacgacgaaaatcttcatgcctttcctggaatatcatcgactgttgccaatgatgtcagaaaatattctgttgtgttagtttataataacaagtatgacattgtaaaagacaaatatatgtggtgttacagtcaggtgaacaagagatatattggagcactgttgcctatgtttgagtgcaatgaatatctacaaattggagatccgatccatgatcaagaaggaaatcaaatttctatcatcacataccgccacaaaaactactatgctctaagcggaatcgggtacgagagtctagacttgtgcttggaaggagtaaggattcatcatcacacacttgaagcaggaaacgctgtatatggaaaagttcaacatgattattctactatcaaagagaaggccaaagaaatgaatgcactcagttcaggacttatcatcgattaccacgtctggataggagattgtatctgtcaagttactgctgtagacgtacatggaaaggaaattatgagaatgagattcaaaaagggtgcggtgcttccgatcccaaatctggtaaaagttaaacttggggagaatgatacagaaaatctttcttctactatatcggcggcgccatcgaggtaaccacctctctggaagacagcgtgaataatgtactcatgaaacgtttggaaactatacgccatatgtggtctgttgtatatgatcattttgatattgtgaatggtaaagaatgctgttatgtgcatacgcatttgtctaatcaaaatcttataccgagtactgtaaaaacaaatttgtacatgaagactatgggatcatgcattcaaatggattccatggaagctctagagtatcttagcgaactgaaggaatcaggtggatggagtcccagaccagaaatgcaggaatttgaatatccagatggagtggaagacactgaattaattgagagattggtagaggagttcttcaatagatcaaaacttcaggctggtaaattagtcaaatttggtaattctattaattgttaaacatacatctgtttcagctaagcaactaagaacacgtatacggcagcagcttccttttatactctcatcttttaccaacacaaagggtggatatttgttcattggagttgataataatacacacaaagtatttggattcacggtgggttacgactacctcagactggtagagaatgatatagaaaagcatatcaaaagactttgtgttgtgcatttctgtgagaagaaagaggacatcaagtacacgtgtcgattcatcaaggtatataaacctggggatgagactacctcgacatacgtgtgcgctatcaaagtggaaagatgctgttgtgctgtgtttgcagattggccagaatcatggtatatggatactaatggtatcaataagtattctccagatgaatgggtgtcacatataaaattttaattaatgtaatagagaacaaataataaggttgtaatatcatatagacaataactaacaattaattagtaactgttatctcttttttaactaaccaactaactatatacctattaatacatcgtagttatagttcttaacatctattaatcattaattcgcttctttaattttttataaactaacattgttaattgaaaagggataacatgttacagaatataaattatatatggatttttttaaaaaggaaatacttgactggagtatatatttatctcttcattatatagcacgcgtgttttccaatttttccacatcccatataatacaggattataatctcgttcgaacatacgagaaagtggataaaacaatagttgattttttatctaggttgccaaatttattccatattttagaatatggggaaaatattctacatatttattctatggatgatgctaatacgaatattataattttttttctagatagagtattaaatattaataagaacgggtcatttatacacaatctcaggttatcatcatccattgatataaaagaatatgtatatcaattagttaataatgatcatccagataataggataagactaatgcttgaaaatggacgtagaacaagacattttttgtcctatatatcagatacagttaatatctatatatgtattttaataaatcatggattttatatagatgccgaagacagttacggttgtacattattacatagatgtatatatcactataagaaatcagaatcagaatcatacaatgaattaattaagatattgttaaataatggatcagatgtagataaaaaagatacgtacggaaacacaccttttattctattatgtaaacacgatatcaacaacgtggaattgtttgagatatgtttagagaatgctaatatagactctgtagactttaatagatatacacctcttcattatgtctcatgtcgtaataaatatgattttgtaaagttattaatttctaaaggagcaaatgttaatgcgcgtaatagattcggaactactccattttattgtggaattatacacggtatctcgcttataaaactatatttggaatcagacacagagttagaaatagataatgaacatatagttcgtcatttaataatttttgatgctgttgaatctttagattatctattatccagaggagttattgatattaactatcgtactatatacaacgaaacatctatttacgacgctgtcagttataatgcgtataatacgttggtctatctattaaacaaaaatggtgattttgagacgattactactagtggatgtacatgtatttcggaagcagtcgcaaacaacaacaaaataataatggaagtactattgtctaaacgaccatctttgaaaattatgatacagtctatgatagcaattactaaaaataaacaacataatgcagatttattgaaaatgtgtataaaatatactgcgtgtatgaccgattatgatactcttatagatgtacaatcactacagcaatataaatggtatattttaagatgtttcgatgaaatagatatcatgaagagatgttatataaaaaataaaactgtattccaattagttttttgtatcaaagacattaatactttaatgagatatggtaaacatccttctttcgtgaagtgcactagtctcgacgtatacggaagtcgtgtacgtaatatcatagcatctattagatatcgtcagagattaattagtctattatccaagaagctggatcctggagataaatggtcgtgttttcctaacgaaataaaatataaaatattggaaaactttaacgataacgaactgtccacatatctaaaaatcttataaacattattaaaatataaaatctaagtggataaaatcacactacatcattgtttccttttagtgctcgacagtgtatactatttttaacgctcataaataaaaatgaaaacgatttccgttgttacgttgttatgcgtactacctgctgttgtttattcaacatgtactgtacccactatgaataacgctaaattaacgtctaccgaaacatcgtttaataataaccagaaagttacgtttacatgtgatcagggatatcattcttcggatccaaatgctgtctgtgaaacagataaatggaaatacgaaaatccatgcaaaaaaatgtgcacagtttctgattacatctctgaactatataataaaccgctatacgaagtgaattccaccatgacactaagttgcaacggcgaaacaaaatattttcgttgcgaagaaaaaaatggaaatacttcttggaatgatactgttacgtgtcctaatgcggaatgtcaacctcttcaattagaacacggatcgtgtcaaccagttaaagaaaaatactcatttggggaatatatgactatcaactgtgatgttggatatgaggttattggtgctttgtacataagttgtacagctaattcttggaatgttattccatcatgtcaacaaaaatgtgatatgccgtctctatctaacggattaatttccggatctacattttctatcggtggcgttatacatcttagttgtaaaagtggttttacactaacggggtctccatcatccacatgtatcgacggtaaatggaatcccatactcccaacatgtgtacgatctaacgaaaaatttgatccagtggatgatggtcccgacgatgagacagatttgagcaaactctcgaaagacgttgtacaatatgaacaagaaatagaatcgttagaagcaacttatcatataatcatagtggcgttaacaattatgggcgtcatatttttaatctccgttatagtattagtttgttcctgtgacaaaaataatgaccaatataagttccataaattgctaccgtaaatataaatccgttaaaataattaataatttaataacaaacaagtatcaaaagattaaagacttatagctagaatcaattgagatgtctttttcagtggatgttgatatctacgatgccgttagagcatttttactcaggcactattataacaagagatttattgtgtatggaagaagtaacgccatattacataatatatacaggctatttacaagatgcgccgttataccgttcgatgatatagtacgtactatgccaaatgaatcacgtgttaaacaatgggtgatggatacactcaatggtataatgatgaatgaacgcgatgtttctgtaagcgttggcaccggaatactattcatggaaatgtttttcgattacaataaaataattcaaaaaatagtatcaacaatcaactaatgtatgatataattaatagcgtatctataattctagctaatgagagatatagaagcgcttttaacgacgatggtatatacatccgtagaaatatgattaacaagttgtacggatacgcatctctaactactattggcacgatcgctggaggtgtttgttattatctgttgatgcatctagttagtttgtataaataattatttcaatatactagttaaaattttaagattttaaatgtataaaaaactaataacgtttttatttgtaataggtgcattagcatcctattcgaataatgagtacactccgtttaataaactgagtgtaaaactctatatagatggagtagataatatagaaaattcatatactgatgataataatgaattggtgttaaattttaaagagtacacaatttctattattacagagtcatgcgacgtcggatttgattccatagatatagatgttataaacgactataaaattattgatatgtataccattgactcgtctactattcaacgcagaggtcacacgtgtagaatatctaccaaattatcatgccattatgataagtacccttatattcacaaatatgatggtgatgagcgacaatattctattactgcagagggaaaatgctataaaggaataaaatatgaaataagtatgatcaacgatgatactctattgagaaaacatactcttaaaattggatctacttatatatttgatcgtcatggacatagtaatacatattattcaaaatatgatttttaaaaatttaaaatatattatcacttcagtgacagtagtcaaataacaaacaataacaataacagacaacaaacaacaccatgagatatattataattctcgcagttttgttcattaatagtatacatgctaaaataactagttataagtttgaatccgtcaattttgattccaaaattgaatggactggggatggtctatacaatatatcccttaaaaattatggcatcaagacgtggcaaacaatgtatacaaatgtaccagaaggaacatacgacatatccgcatttccaaagaatgatttcgtatctttctgggttaaatttgaacaaggcgattataaagtggaagagtattgtacgggactatgcgtcgaagtaaaaattggaccaccgactgtaacattaactgaatacaacgaccatatcaatttgtacatcgagcatccgtatgctactagaggtagcaaaaagattcctatttacaaacgcggtgacatgtgtgatatctacttgttgtatacggctaacttcacattcggagattctaaagaaccagtaccatatgatatcgatgactacgattgcacgtctacaggttgcagcatagactttgtcacaacagaaaaagtgtgcgtgacagcacagggagccacagaagggtttctcgaaaaaattactccatggagttcgaaagtatgtctgacacctaaaaagagtgtatatacatgcgcaattagatccaaagaagatgttcccaatttcaaggacaaaatggccagagttatcaagagaaaatttaataaacagtctcaatcttatttaactaaatttctcggtagcacatcaaatgatgttaccacttttcttagcatgcttaacttgactaaatattcataactaatttttattaatgatacaaaaacaaaataaaactgcatattatacactggttaacgcccttataggctctaaccattttcaagatgaggtccctgattatagtccttctgttcccctctatcatctactccatgtctattagacgatgtgagaagactgaagaggaaacatggggattgaaaatagggttgtgtataattgccaaagatttctatcccgaaagaactgattgcagtgttcatctcccaactgcaagtgaaggattgataactgaaggcaatggattcagggatatacgaaacaccgataaattataaaaaagcaatgtgtccgctgtttccgttaataatactattttcgtaactggcggattattcataaataactctaatagcacgatcgtggttaacaatatggaaaaacttgacatttataaagacaaacaatggtcgattatagaaatgcctatggctagggtatatcacggcatcgactcgacatttggaatgttatattttgccggaggtctatccgttaccgaacaatatggtaatttagagaaaaacaacgagatatcttgttacaattctagaacgaataagtggtttgatatttcatatactatttataagatatccatatcatcattgtgtaaactaaataacgtcttctatgtatttagtaaggacattggatatgtggaaaagtatgatggtgcatggaagttagtacatgatcgtctccccgctataaaggcattatcaacttctccttattgattgaaaatgaaaatataaatagtttttatgtatagcagtattaccctatagttttattgcttactactaacatggatacagatacagatacagatacagatgttacaaatgtagaagatatcataaatgaaatagatagagagaaagaagaaatactaaaaaatgtagaaattgaaaataataaaaacattaacaagaatcatcccaatgaatatattagagaagcactcgttattaataccagtagtaatagtgattccattgataaagaagttatagaatgtatctgtcacgatgtaggaatatagatcatatctactaatttttataatcaatacaaaacataaaaaacaactcgttattacatagcaggcatggaatccttcaagtattgttttgataacgatggcaagaaatggattatcggaaatactttatattctggtaattcaatactatataaggtcagaaaaaatttcactagttcgttctacaattacgtaatgaagatagatcacaaatcacacaagccattgttgtctgaaatacgattctatatatctgtattggatcctttgactatcgacaactggacacgggaacgtggtataaagtatttggctattccagatctgtatggaattggagaaaccgatgattatatgttcttcgttataaagaattcgggaagagtattcgccccaaaggatactgaatcagtcttcgaagcatgcgtcactatgataaacacgttagagtttatacactctcgaggatttacccatggaaaaatagaaccgaggaatatactgattagaaataaacgtctttcactaattgactattctagaactaacaaactatacaagagtgaaaactcacatatagattacaacgaggacatgataacttcaggaaatatcaattatatgtgtgtagacaatcatcttggagcaacagtttcaaaacgaggagatttagaaatgttgggatattgcatgatagaatggttcggtggcaaacttccatggaaaaacgaaagtagtataaaagtaataaaacaaaaaaaagaatataaaaaatttatagctactttctttgaggactgttttcctgaaggaaatgaacctctggaattagttagatatatagaattagtatacacgttagattattctcaaactcctaattatgacagactacgtaaactgtttatacaagattgaaattatattctttttttatagagtgtggtagtgttacggatatctaatatttaatattagactatctctatcgcgctacacgaccaatatcgattactatggatatcttcagggaaatcgcatcttctatgaaaggagagaatgtatttatttctccagcgtcaatctcgtcagtattgacaatactgtattatggagctaatggatcaactgctgaacagctatcgaaatatgtagaaaaggaggagaacatggataaggttagcgctcaaaatatctcattcaaatccataaataaagtatatgggcgatattctgccgtgtttaaagattcctttttgagaaaaattggcgataagtttcaaactgttgacttcactgattgtcgcactatagatgcaatcaacaagtgtgtagatatctttactgaggggaaaatcaatccactattggatgaaccattgtctcctgatacctgtctcctagcaattagtgccgtatactttaaagcaaaatggttgacgccattcgaaaaggaatttaccagtgattatcccttttacgtatctccgacggaaatggtagatgtaagtatgatgtctatgtacggcaaggcatttaatcacgcatctgtaaaggaatcattcggcaacttttcaatcatagaactgccatatgttggagatactagtatgatggtcattcttccagacaagattgatggattagaatccatagaacagaatctaacagatacaaattttaagaaatggtgtgactttatggatgctatgtttatagatgttcacattcccaagtttaaggtaacaggctcgtataatctggtggatactctagtaaagtcaggactgacagaggtgttcggttcaactggagattatagcaatatgtgtaattcagatgtgagtgtcgacgctatgatccacaaaacgtatatagatgtcaatgaagagtatacagaagcagctgcagcaacttgtgcactggtgtcagactgtgcatcaacaattacaaatgagttctgtgtagatcatccgttcatctatgtgattaggcatgttgatggaaaaattcttttcgttggtagatattgctctccgacaactaattgttaaccattttttttaaaaaatagaaaaaacatgtggtattagtgcaggtcgttattcttccaattgcaattggtaagatgacggccaactttagtacccacgtcttttcaccacagcactgtggatgtgacagactgaccagtattgatgacgtcagacaatgtttgactgaatatatttattggtcgtcctatgcataccgcaacaggcaatgcgctggacaattgtattccacactcctctcttttagagatgatgcggaatcagtgttcatcgacattcgcgagctggtaaaaaatatgccgtgggatgatgtcaaagattgtgcagaaatcatccgttgttatataccggatgagcaaaaaaccatcagagagatttcggccatcatcggactttgtgcatatgctgctacttactggggaggtgaagaccatcccactagtaacagtctgaacgcattgtttgtgatgcttgagatgctaaattacgtggattataacatcatattccggcgtatgaattgatgagttgtacatcttgacattttcttctttcttctcttctcccttcctccctcttctccctttcccagaaacaaactttttttacccactataaaataaaatgagtatactacctgttatatttctttctatatttttttattcttcattcgttcagacttttaacgcgtctgaatgtatcgacaaagggcaatattttgcatcattcatggagttagaaaacgagccagtaatcttaccatgtcctcaaataaatacgctatcatccggatataatatattagatattttatgggaaaaacgaggagcggataatgatagaattataccgatagataatggtagcaatatgctaattctgaacccgacacaatcagactctggtatttatatatgcattaccacgaacgaaacctactgtgacatgatgtcgttaaatttgacaatcgtgtctgtctcagaatcaaatatagattttatctcgtatccacaaatagtaaatgagagatctactggcgaaatggtatgtcccaatattaatgcatttattgctagtaacgtaaacgcagatattatatggagcgggcatcgacgccttagaaataagagacttaaacaacggacacctggaattattaccatagaagatgttagaaaaaatgatgctggttattatacatgtgttttagaatatatatacggtggcaaaacatataacgtaaccagaattgtaaaattagaggtacgggataaaataataccttctactatgcaattaccagatggcattgtaacttcaataggtagtaatttgactattgcatgcagagtatcgttgagacctcccacaacggacaccgacgtcttttggataagtaatggtatgtattacaaagaagatgatggggacggaaacggtagaataagtgtagcaaataaaatctatatgaccgataagagacgtgttattacatcccggttaaacattaatcctgttaaggaaaaagatgctacaacgtttacgtgtatggcgtttactattcctagcatcagtaaaacagttactgttagtataacgtgaatgtatgttgttacatttccatgtcaattgagtttataagaatttttatacattatcttccaacaagcaattgacgaacgtattgctatgattaactcccacgatactatgcatattattaatcattaacttgcagactatacctagagctattttgacatactcgtgttcttgtgtaattgcagtatctatattattaaagtacgtaaatctagctatagttttattatttaattttagataatataccgtctccttatttttaaaaattgttacatcctttattaaatcattaatgggaatttctatgtcatagttaatatattgtgaacaacaagagcagatatctataggaaagggtggaatgcgatacattgatctatgtagttttaaaacacacgcaaactttgaagaatttatataaatcattccatcaatacatccttctatgttgagatgtatatatccaggaattcgtttattaatatcgggaaatgtataaactaaaacattgcccggaagcggagcttctaccggagttatatcagtttttaacttacaaaatgtaaccaatacctttgcatgacttgttttgttcggcaacgttagtttaaacttgacgaatggattaattacaatagcatgatccgcgcatctattaagtttttttactttaacgcccttgtatgtttttacagagactttatctaaatttctagtacttgtatgtgttataaatataacgggatatagaaccgaatcacctaccttagatacccaattacattttatcagatccagataataaacaaattttgtcgccctaactaattttatattgttatatattttacaattggttatgatatcatgtaataacttggaatctaacgcacatcgtcgtacgtttacacaattgtgatttagtgtagtatatctacacatgtatttttccgcgctatagtattctggactagtgataaaactatcgttatatctgtcttcgatgaactcatcgagatattgctctctgtcatatttatacacctgcataaactttctagacatcttacaatccgtgttattttaggatcatatttacatatttactggtataaagatgttagattagttaatgggaatcgtctataataatgaatattaaacaattatatgaggacttttaccacaaagcatcataaaaatgagtcgtcgtctgatttatgttttaaatatcaaccgcaaatcaactcataaaatacaagagaatgaaatatatacatattttagtcattgcaatatagaccatacttctacagaacttgattttgtagttaaaaactatgatctaaacagacgacaacatgtaactgggtatactgcactacactgctatttgtataataattactttacaaacgatgtactgaagatattattaaatcatgacgtaaatgtaacgatgaaaaccagtagcggacgtatgcctgtttatatattgcttactagatgttgcaatatttcacatgatgtagtgatagatatgatagacaaagataaaaaccacttattacatagagactattccaacatattactagagtatataaaatctcgttacatgttattaaaggaagaggatatcgatgagaacatagtatccactttattagataagggaatcgatcctaactttaaacaagacggatatacagcgttacattattattatttgtgtctcgcacacgtttataaaccaggtgagtgtagaaaaccgataacgataaaaaaggccaagcgaattatttctttgtttatacaacatggagctaatctaaacgcgttagataattgtggtaatacaccattccatttgtatcttagtattgaaatgtgtaataatattcatatgactaaaatgctgttgacttttaatccgaatttcaaaatatgtaataatcatggattaacgcctatactatgttatataacttccgactacatacaacacgatattcttgttatgttaatacatcactatgaaacaaatgttggagaaatgccgatagatgagcgtcgtataatcgtattcgagtttatcaaaacatattctacacgtccggcagattcgataacttatttgatgaataggtttaaaaatataaatatttatacccgctatgaaggaaagacattattacacgtagcatgtgaatataataatacacaagtaatagattatcttatacgtatcaacggagatataaatgcgttaaccgacaataacaaacacgctacacaactcattatagataacaaagaaaattccccatataccattaattgtttactgtatatacttagatatattgtagataagaatgtgataagatcgttggtggatcaacttccatctctacctatcttcgatataaaatcatttgagaaattcatatcctactgtatacttttagatgacacattttacaatagacacgttaggaatcgcaattctaaaacgtatcgatacgcattttcaaaatacatgtcgtttgataaatacgatggtataataactaaatgtcataaagaaacaatattgctcaaactatccactgttctagacactacactatatgcagttttaagatgccataattcgaaaaagttaagaagatacctcaacgagttaaaaaaatataataacgataagtcctttaaaatatattctaatattatgaatgagagataccttaatgtatattataaagatatgtacgtgtcaaaggtatatgataaactatttcctgttttcacagataaaaattgtctactaacattactaccttcagaaattatatacgaaatattatacatgctgacaattaacgatctttataatatattgtatccacctaccaaagtatagttgtatttttctcatgcgatgtgtgtaaaaaaactgatattatataaatattttagtgccgtataatgaagatgacgatgaaaatgatggtacatatatatttcgtatcattatcattattgttattgctattccacagttacgccatagacatcgaaaatgaaatcacagaattcttcaataaaatgagagatactctaccagctaaagactctaaatggttgaatccagcatgtatgttcggaggcacaatgaatgatatagccgctctaggagagccattcagcgcaaagtgtcctcctattgaagacagtattttatcgcacagatataaagactatgtggttaaatgggaaaggctagaaaaaaatagacggcgacaggtttctaataaacgtgttaaacatggtgatttatggatagccaactatacatctaaattcagtaaccgtaggtatttgtgtaccgtaactacaaagaatggtgactgtgttcagggtatagttagatctcatattaaaaaacctccttcatgcattccaaaaacatatgaactaggtactcatgataagtatggcatagacttatactgtggaattctttacgcaaaacattataataatataacttggtataaagataataaggaaattaatatcgacgatattaagtattcacaaacgggaaagaaattaattattcataatccagagttagaagatagtggaagatacaactgttacgttcattacgacgacgttagaatcaagaatgatatcgtagtatcaagatgtaaaatacttacggttataccgtcgcaagaccacaggtttaaactaatactagatccaaaaatcaacgtaacgataggagaacctgccaatataacatgcactgctgtgtcaacgtcattattgattgacgatgtactgattgaatgggaaaatccatccggatggcttataggattcgattttgatgtatactctgttttaactagtagaggcggtatcaccgaggcgaccttgtactttgaaaatgttactgaagaatatataggtaatacatataaatgtcgtggacacaactattattttgaaaaaacccttacaactacagtagtattggagtaaatacacaatgcatttttatatacattactgaataattattattattatttatatcgtatttgtgctatagaatgaatgaggatacgcgactatctaggtatttgtatctcactgatagagaacatataaatatagactctattaaacagttgtgtaaaatatcaaatcctaatgcatgttatagatgtggatgtacggctttacatgagtacttttataattatagatcagttaacggaaaatacaagtatagatacaacggttactatcaatattattcatctagcgattatgaaaattataatgaatattattatgatgattatgatagaactggtatgaacagtgagagtgagagcgagagtgataatatatcaatcaaaacagaatatgagaatgaatatgaattctatgatgaaacacaagatcaaagtacacaactagtaggttacgacattaaactcaaaaccaatgaggatgattttgtggatgaattttatggctatgatagatcagtgggtgtccatgattatatagatgaatcaattaataaagtagtatatggaagagagtctcacgtaagatggcgggatatatggcaagaacataatgatggcgtatacagtataggaaaggagtgcatagataatatatacgaagacaaccataccgtagacgaattctacaagatagacagcgtatcagatgtagatgacgcggaacacatatctccgataactaatgatgtatctacacaaacatgggaaaagaaatcagagttagatagatacatggaaatgtatcctcgtcatagatatagtaagcattctgtctttaagggattttctgacaaagttagaaaaaatgatttagacatgaatgtggtaaaagaattactttctaacggtgcatctctaacaatcaaggatagcagtaataaggatccaataaccgtttattttcgaagaacgataatgaatttagaaatgattgatattattaacaaacatacaactattgatgaacgaaagtatatagtacactcctatctaaaaaattataaaaatttcgattatccatttttcaggaagttagttttgactaataaacattgtctcaacaattattataatataagcgacagcaaatatggaacaccgctacatatattggcgtctaataaaaaattaataactcttaattacatgaagttattagtgtataacggaaatgatataaacgcacgaggtgaagatacacaaatgcgaactccattacacaaatatttgtgtaaatttgtatatcataatattgaatatggtgtccgatactataatgaaaagattatagacgcatttatagagttaggagccgatctaactattccaaataacgatggaatgataccagtagtttactgtatacactcaaatgcagaatatggttataacaatattactaacataaagataatacgtaaactacttaatcttagtagacgtgcgtcacataatctatttagagatcgagtcatgcacgattatataagtaatacatatattgatcttgagtgtttagatattattagatcgttggatggattcgatatcaatggttactttgaaggacgtacaccacttcattgcgctatacaacataacttcactcagattgctaagtacttattagatcgaggagctgatatatcattaaagacagacgatggtaaaactgtatttgatttatcgttatgtagttacatccctcttaaatggactagctttttgattagtcgtctaccgcctaaaagtgtcatatgctcactgactaaccatataatagattatgttcttacgaacaatagacgtattatttggcagagtcaaatgattaataagtacgtactgttactggacccatccttttattctagatttagaaatgctatcgaaagcaaattaaaccaacacgctaatcgttataataggttcgaacacgatagagatcgcgttaatgaaaattatgacaaagtcttacatgacatagacatatatattaaggatgtacaaatattaaaatctatttccatcactaataatataacactatacgatactattataaataagtcagagtttcctatacgtcgtgcaaatgacaaacaattaattaataaaataaaatccaatatatatcataatcttatcgaaaaagttattaaaaatgcattagagaaatgcactctgactaatgccgtcctcgagtatatgatgtcatctcgatctcaatcatcttatttgagtcgtattcctaatgagatattactcgaaatattatataaactcgacatgtacgatttacgtaatctatatacaagatatatgagagagaatgatatcacagagtatcatatagagaatacgaggtctgtttctacacagacatgaataatgaatacacactacaacgtttttttttaaaatcttagatataacactaaaattacatcaagattataatattgaaatcgtaatttgagttgtttgataatcatggatatcaaaaatgatatacgtaacattagcaatcttttagatgatgatatattatgcgatgtaatcataactatcggagatggagaagaaattaaggcgcataaaactatcttggctgccggatctacgtattttaaaacaatgttcacgacacctatgatagcgagagatctagtaactagagtaaatctacagatgtttgataaagatgtcgttaaaaatattgtacagtacttatacaataggcatataagttctatgaatgtaatagacgtattaaaatgcgccgactatcttctaatcaatgatctagtcactaactgtgaatcctatattaaagattatattaatcatgatatataccataagttatatgagatggttcatattccaatagtcaaatatattaaacgtatgctgataagtaatataccaacattgataactacgaacgcatttaaaaaaacagtatttgaaatattattcgatattatttctactaacgacagtgtatatttatacagagaaggatataaagtgacgatactattgaagtggctagaatacaactacatcaccgaagaacagctgttgtgtatactgtcctgtatagatatacaaaatctagataaaaagtctagactactactctattcgaataaaactataaatatgcatccttcgtgtatacaatttctattagataataaacagaatagaaacattataccccaccagttatgtttagcgtgtcatgatactaactataatgtatgtaacccgtgtatagtagtgtataacattaatactatggaatatagtgttatttccaccattcctaatcacataattaattacgcatccgcaattgtagataatgacataataatagctagaggatataactttaataatccatcattaaacaaggtatataaaataaacattgagaacaaaatacatgtagaactcccacccataataaaaaatagatgtcgtttttcattggctgtaatcgatgacacaatttatgctataggtggtcaaaacggtacgaacgtagaacgaactatagaatgttatacaatgggtgatgataagtggaagatgttacccaatatgcccatagcattatctagttatggcatgtgtgtattagatcaatacatatacattataggcggtcgtacccaacacattgattatacatcagtgcatacagtaaatagcatagatatggaggaggatacaaatatttcaaataaagttatgagatacgacactgtcaataatatatgggaaacattacctaacttctggactggaactataaatccaggcgtggtctcgcataaagatgatatatatgttgtatgcgacatcaaagatgaaaaaaatgttaaaacttgtatatttagatataacacgaatacgtataacggatgggaattggtcacgacgacagaaagcagattatcagctctgcatactattctttataacaataccataatgatgttacattgttatgaatcgtatatgttacaagatacatttaatgtgtacactcgcgaatggaatcatatgtgtcatcaacattcgaatagttatatcatgtacaatatactacccatctactaaatataatagaataaaataaatgagtatgatcattttagataacgattgattttatcattaccgcttcattcttatattctttgcttacggaacctatatttagaaacatctactaacgattttttatgcttgcattattaatggtatgtaatatgattgattgtgtacgcaataccaatttgttaagtatgaatacggggtacaaacataaactgaaatttaacattatttatttatgatatatatcgttatcgttatcgttatcgttatcgttatcgttattgtttggtctataccatggatatctttaaagaactaatcttaaaacacacggatgaaaatgttttgatttctccagtttctattttatctactttatctattctaaatcatggagcagctggttctacagctgaacaactatcaaaatatatagagaatatgaatgaaaatacacccgatgataagaaggatgacaataatgacatggacgtagatattccgtattgtgcgacactagctaccgcaaataaaatatacggtagcgatagtatcgagttccatgcctccttcctacaaaaaataaaagacgattttcaaactgtaaactttaataatgctaaccaaacaaaggaactaatcaacgaatgggttaagacaatgacaaatggtaaaattaattccttattgactagtccgctatccattaatactcgtatgacagttgttagcgccgtccattttaaagcaatgtggaaatatccattttctaaacatcttacatatacagacaagttttatatttctaagaatatagttaccagtgttgatatgatggtgggtaccgagaataacttgcaatatgtacatattaatgaattattcggaggattctctattatcgatattccatacgagggaaactctagtatggtgattatactaccggacgacatagaaggtatatataacatagaaaaaaatataacagatgaaaaatttaaaaaatggtgtggtatgttatctactaaaagtatagacttgtatatgccaaagtttaaagtggaaatgacagaaccgtataatctggtaccgattttagaaaatttaggacttactaatatattcggatattatgcagattttagcaagatgtgtaatgaaactatcactgtagaaaaatttctacatacgacgtttatagatgttaatgaggagtatacagaagcatcggccgttacaggagtatttatgactaacttttcgatggtatatagtacgaaggtctacataaaccatccatttatgtacatgattaaagacaacacaggacgtatactttttatagggaaatactgctatccgcaataaatataaacaaatagacttttatcacgtttatctatgtctaaatattacaaatagtaatagtataaactaaagctgataatacattaaaacttaaaaaaataataatatcatttacaattaatagtataaactaaaaattaaacaaatcgttattataagtaatatcaaaatgatgatatacggattaatagcgtgtcttatattcgtgacttcatccatcgctagtccactttatattcccgttattccacccattacggaagataaatcgttcaatagtgtagaggtattagtttccttgtttagagatgaccaaaaagactatacggtaacttctcagttcaataactacactatcgataccaaagactggactatcggcgtactatccacacctgatggtttggatataccattgactaatataacttattggtcacggtttactataggtcgtgcattgttcaaatcagagtctgaggatattttccaaaagaaaatgagtattctaggtgtttctatagaatgtaagaagtcgtcgacattacttacttttttgaccgtgcgtaaaatgactcgagtatttaatagatttccagatatggcttattatcgaggagactgtttaaaagccgtttatgtaacaatgacttataaaaatactaaaactggagagactgattacacgtacctctctaatgggggttgcctgcatactatcgtaatggggtcgatggttgattattgattagtatattccttattctttttattcacacaaaaagaacatttttataaacatgaaaccactgtctaaatgtaattatgatcttgatttatagatgaagatcagcctttagaggattttaaccagtatgtttaatatgaaaaaaataaacataacatattttgagattaagcgctattgtgcttaattattttgctctataaactgaatatatagccacaattattgacgggcttgtttatgaccggcaatcatgaatttacagaaattatctctggctatatatcttactgcgacatgttcgtggtgttatgaaacatgcataagaaaaactgcgttgtatcatgacattcaattggagcatgtagaagacaataaagatagtgtagcgtcgctaccgtacaagtatctacaagtagtcaatcaaagagaacgtagtagattgttggctacatttaattggacagatatagctgagggtgttagaaatgagttcattaaaatatgtgatatcaacggaacatatttatataattatactattgctgttagtataattattgattccacggaagaactaccaacagttactccaattacaacaacatatgaaccttctacatataattatactatcgatgatagcactgttattactactgaagaactacaagtaactccatcaccaactccaacatatgcacatgtaacaactcctcttccaacatcagcagttccttatgatcaacgatcgaataacaatgtaagcactatatctattcaggtactgagtaaaatattgggagtcaatgaaacagaattaactaattatcttattacgcataaaaatgccacggttgacaataacaccatggtcaatgatgaaacatctgacaataacacattgcatggtaatataggatttttggaaataaataattgttacaatgtttctgtatcagatgctagttttagaataacattagtaaacgatacttctgaagaaattttgctaatgctaacaggaactagttcatccaacacctttatatcttccaccaatatcactaaatgtttgaaaacattaatcaataatgcgtcaattaatgatgtacttataacacaaaatatgaatgtaacatctaattgtgataaatgctcaatgaatttgatggcatccgttattcctgcagttaatgaatttaacaatacgttgatgaaaattggtgtaaaaaatgatgaaaacaatacggtatataaatattataattgtaaactaactacaaattctacgtgtgatgagttaatcaatttagatgaagtcattaacaacataactctaacaaatattatacgcaatagtgtttcaataactaacagcaggaaaagacgagatttgaatggtgagtttgaattttccacttccaaggaattagattgtctttacaaatcatatggtgtaaacgaggatgtaagtcattgttttgcatcacctagacgtaaacgatctgacgacaaaaaggagtacatggacatgaaattattcgaccacgcgaaaaaagatttaagaatagacagtgttattcctaaaggtacaactcatttccaagtaggtacatctggtgcaagtggtggtgttgtaggagataggtccccatttcaaaatgttaaatcacgtgcaagtctattggcggaaaaaataatgcctagagtacctactactgctaccgaagagcagctatatgcaactgtaaataaacaaaccaagttgcctgcaggtgttaaaagtactccgtttacagaggctcttgtgtctacgataaaccaaaagctttctagtgctaaagaggtaacttatgcttcgctcaatctgccaggatcaagtggctatgttcatagaccatctgattctgttatttacagcagtataagacggtcacgtttacctagtgatagtgatagtgattatgaagatatacaaactgttgttaaggaatataatgaaagatatggtagaccagtcagtaaaacacagttatcaagtagtgaaagtgattttgaagatatagatactgttgttagagaaattaaacaacaaaaatatggtggagctagccgtgttagaacatcatcaagtagtagtgattttgaagatatgaatactgttgttagggaatatagacaaaaatatggcaatgcaatggcaaaaggacgtagtagttcccctaaacctgatccattatatagtactgttaagaaaacaactaaaagtctatcaggtggtgtagacatagttacaaaacaatcagactattctctattacctgacgttaatactggtagttctattgtgtcacctctcaccagaaaaggagctactagacgccctacaaatgatggtctacagagtccaaatcctcctccccgtaatccccgtcgaccacttcctcaacatgatgattattctcctccacaagttcctcagcgcgattattctcctccgcgcagacctccgccacttcctcctaaaccagtccaaaatccgccacgacttccccctagaccagcaggtcaattacctcctatagatcaaccagataaaggatttagtaagtttgtatcacctagacggtgtagaagagcaagctctggagtcatatgtggtatgatacaatcaaaaccaaacgatgatacctatttacttcttcaacggccaaaacttgaaccagaatatgcggaggtcggtaatggtatacccaagaacaatgttcctgtaataggtaataaacatagtaaaaaatatacatcggcgatgttaaaaatatcaacaaaatttgataaatctacggcatttggagcagcaatgttactaactggtcagcaggccattagccaacagactagatcaactgcgttaagtagaaaagatcagatgagcaatgaagaaaagatattcgaagcagttacaatgagtctatcaactataggttcaacgttgacgtctgcgggtatggcgggcggtccaaaactaatgattgcaggaatggctataacggctataactggtataatagatacgataaaagatatatattacctgttttcaggacaggagaggccggcagatcctgttattaaattatttaatacatacgctggcttattatccgatagtaataaaatgggggtaagaaaatgtttgacgcccggtgacgacacacttatttatattgcatacagaaacgatagcagttttaaacatagtacggatgcgatggctttgtatttcttagatgttatcgactcagagatcctatatctaaacacatcaaatttagttctagagtatcaactaaaggtggcttgtcccataggaacattaagatctgtagatgtggacataactgcgtatacaatattatatgatacagcggataatattaagaaatacaagtttatcagaatggcaacgctactatccaaacatccagttattagattgacatgtggtttagcagcaacattggtaattaaaccgtacgaggtacccattagtgatatgcaactactaaaaatggcgacgcctggtgaaccagaatccactaggtctataccatctgatgtctgtgataggtatcctctaaagaaattctatcttttggctggtggttgtccctatgatacatctcaaacttttattgtacatactacttgcagtattctactaaaaacagctacacgtgatcagtttagaaacagatgggtgttacaaaatccatttagacaagaaggggaatataagcaactgtttacctttagcaaatacgattttaacgacaccataatcgatcctaatggtgtggcgggtcatgctagcttttgtaccaataaaagcagcaaccaatgtttctggtccgaacctatgatattggaagatgtatcatcgtgtagttctagaactagaaaaatatacgtaaaactgggaatatttaatgctgaaggttttaatagttttgtactaaactgtccaactgggtctacacctacatacatcaaacataaaaatgcggacagtgacaatgttatcatagagctacctgtaggtgattacggcacagccaaattgtattcagcaacaaaaccgtcgaggatagctgtgttttgcacacataactatgataaacgattcaaatcagatattatagttctaatgtttaataaaatcagcggtgttccattttggagcatgtacacaggaagtgtaactagtagaaatagaatgtttaccacattgtctagaggaatgccgtttagatcaacgtattgcgataacagacgacgatcaggttgttattatgcaggaataccatttcatgaagatagtgtagaagcagatctacattatggaccaaaaataatgttaaaggaaacatatgacacaaacagtattgacccacgagttataacaaagtcaaagacgcactttcctagtccaataagtgtaaaattcatggctgacaatttaggaaatggatatgacaaccctaattcattttgggaagatgctaaaactaagaaacggacatatagtgcaatgacgataaaagttctaccatgtacagtgagaaataaaaatatagactttggatataactatggagatattatttctaatatggtttatctacaatctactagtcaggattatggagatggtaccaaatatacatttaaatccgtaactagatcagatcatgagtgtgaatctagcttagatctgacgtctaaggaagtaactgtgacatgtcctgcgtttagtataccaagaaatatatcaacgtatgaaggtctatgctttagtgttactacatctaaagatcattgtgctacaagtaataatgggttaaaatcttctggctatggaaaggaagatgctgttaaaccacgtgcctgctttcatcattggaattattacacactgtcgttggattattactgttcatacgaagatatttggagaagcaactggcctgactatgatccatgtaagtcatatatccatatagagtatagagatacatggatagaatctaacgtgttacagcaacctccttacacatttgaattcactcatgacaattctaacgaatatgtggataaagaaattagtaacaaattaaatgatctgtacaatgcatacaagaagattatggaatatagcgacggatcattgccggcgtctataaacagattagcaaaagcattgacttcagagggtagagaaatagcaagtgttaatatagatggtaatctgttagatatcgcatatcaagcagataaggaaaagatggccgacatacagacaaaaataaatgacatcaccagagacttatttatgcacactctatcagacaaagatataaaagacattatagaatccgaagaaggtaagagatgttgtataatagatgttaagaacaatcgtgttgaaaagtactatcctattgataattatctatgtggtactttagatgattatatatacacctctgtagaatataacaaatcctatgtgttagtaaacgatacttatatgagctacgactatcttgaatcatcaggtatagttgttctatcatgttatgaaatgactataatctccttggatacaaaagacgccaaagatgctatagaagatgtgatagtagcaagtgcggtagccgaagcattgaatgacatgtttaaggaatttgataaaaacgtaagtgctattataataaaagaagaagataattatctaaacagttcgccggatatctaccatataatatatatcataggtggcactattctgctactgttagtcattattttaatattggcaatttatatagcgcgcaataaatacaaaaccaggaaatataaaataatgaaatatgacaataggagcattaaatctgagcatcatgatagtcttgaaacagtgtctatggaaattattgataatcggtactaataaaatagtttaactcttttaaaaccagtttggtactggaatttcagttcattactcgttgagaaattgatgatttttttaaaatgatattacttttatatgcttgcatcgcagaatgatattcacaagtattattaaaaatgagtatcggtagttacattaccatatcatccatgctcatatggatctccatccattatataatcaatgatacatgtattaaaatactttccgaataagtcttttaaatattgtattaattatgaaaaactatgctatgcgagtatgatgcaaagatgtttaatgatacgatactagattttatctctagcgagagatgtcgttagaatcatttatcataactacgtttaataataattcatcaacgaatatcgataacatgtgtcatttatactttaaatacgttaaagtctgtccgtcttctctattgtttagactgtttgtagaatgctgtgatataaacaaactagtagaaggtacgactccgttacactgttatctaatgaatgaaggatttgaatcatctgttttaaaaaacctattaaaggagtatgtcatgaatacgtttaatgttcatgacagtgatggtcacattccattacacaaatatttaactcatgatgaagttgagaatgatatctttgatatgctttctgatagtatagatagctttagctaatataaaaatatattaatccactatatattctagacttgatttaaaaccgataaactactactacgtactgtataagttgttaaaaaaaggagcagaccctaattatgtagatgatagaggtaatacttttcttcattacttctgcatctatatgtccacttatgagaaaacgtcatttaataagatgcatcgtgaaaagaaatttattaaagagttggtaaaatatgaaaccgatattaataaagtaaataatataggaaatacacctctacataactacgtatctcaatatgatatcactctcattcctcatccacaacccattaaaaaaatggaaattaaagccctctattagc

SEQ ID NO: 10 - DNA, 8484 bp, Horsepox virus
taaaatagtttaactcttttaaaaccagtttggtactggaatttcagttcattactcgttgagaaattgatgatttttttaaaatgatattacttttatatgcttgcatcgcagaatgatattcacaagtattattaaaaatgagtatcggtagttacattaccatatcatccatgctcatatggatctccatccattatataatcaatgatacatgtattaaaatactttccgaataagtcttttaaatattgtattaattatgaaaaactatgctatgcgagtatgatgcaaagatgtttaatgatacgatactagattttatctctagcgagagatgtcgttagaatcatttatcataactacgtttaataataattcatcaacgaatatcgataacatgtgtcatttatactttaaatacgttaaagtctgtccgtcttctctattgtttagactgtttgtagaatgctgtgatataaacaaactagtagaaggtacgactccgttacactgttatctaatgaatgaaggatttgaatcatctgttttaaaaaacctattaaaggagtatgtcatgaatacgtttaatgttcatgacagtgatggtcacattccattacacaaatatttaactcatgatgaagttgagaatgatatctttgatatgctttctgatagtatagatagctttagctaatataaaaatatattaatccactatatattctagacttgatttaaaaccgataaactactactacgtactgtataagttgttaaaaaaaggagcagaccctaattatgtagatgatagaggtaatacttttcttcattacttctgcatctatatgtccacttatgagaaaacgtcatttaataagatgcatcgtgaaaagaaatttattaaagagttggtaaaatatgaaaccgatattaataaagtaaataatataggaaatacacctctacataactacgtatctcaatatgatatcactctcattcctcatccacaacccattaaaaaaatggaaattaaagccctctattagcatagacggctacaggtctaccatcaggttaaccttcgtctacctttacaatggcctttccttgtgcccagttcagaccctgtcattgccacgctactaaggactccctgtataccgtggccgacgtcagacattgtctgactgaatacatcctgtgggtttctcatagatggacccatagagaaagcgcagggtctctctacaggcttctcatctctttcagaactgatgcaacggagctctttggtggtgagttgaaggagttctcggattcacttccgtgggacaatatcgacaattgcgtggagatcattaaatgtttcatcagaaatgactccatgaaaaccgccgaagaacttcgtgcaatcattggactttgtactcaatcagctatcgtctctggaagagtcttcaacgataagtatatcgacatactacttatgctgcgaaagattctgaacgaaaacgactatctcaccctcttggatcatatccgcactgctaaatactaaatctccttcatgctctctcactaatactcttactttctcactcactcactcactacactttttatcacacccaccttactttttatcatcttatgaggaatgattgccttcatcatttttcgtgaaatataatataggaataattagcaccagaatagctatggattgcgtcagagattgcacatgtattctatgtcgtctactggatgaagatgtgacgtacgaaaaaataaaactagaaattgaaacgtgtcacaacttatcaaaacatatagatagacgaggaaacaatgcgctacattgttacgtcttcaataaatgcgatacagacattaagattgttcggctgttactctctcgcggagtcgagagactttgtagaaacaacgaaggattaactccgctaggagtatacagtaagcatagatacgtcaaatctcaaattgtgcatctactgatatccagctattcgaattcctctaacaaactcaagtcgaatataaatgatttcgatctgtattcgtatatgtcttcggataatatcgacttacgtctgctaaaatacctaattgtggataaacggatacgtccgtccaagaatacgaattatgcaaacaatagtctcggattggtggatatatacgtaacgacgcctaatccgagaccagaagtattgctatggcttcttaaatcagaatgttacagcaccggttacgtatttcgtacctgtatgtacaacagtgatatgtgtaagaactctcttcattactatatatcgtctcatagagaatctcaatctcaatctctatccaaggatgtaattaaatgtttgatcaataacaatgtttccatccatggcagagacgaaggaggatctttacccatccaatactactggtctttctcaaccatagatatagagattgttaaattattattaataaaggatgtggacacgtgtagagtatacgacgacgtcagtcagccctatattagaggcgtattagcggattatctaaacaagcgatttagagtaaccccatataatgtagacatggaaatcgttaatcttcttattgagagacgtcatactcttgtcgacgtaatgcgtagtattacttcgtacgattccagagaatataaccactacatcattgataacattctaaagagatttagacaacaggatgaatccatcgtacaagccatgttgataaactacttacattacggcgatatggtaagtatacctatcgttcgatgcatgttagataacggagcgaccatggataagacaacggacaacaactatcctctcacgactactttgttaataataatctcgtcgatgtaaacgtcgtaaggtttatcgtggaaaatatggacacgcggctgtaaatcacatatctaacaatggccgtctatgtatgtacggtctgatattatcgagatttaataattgcgggtatcactgttatgaaaccatactaatagatgtatttgatatactaagcaagtacatggataatatagatatgatcgataatgagaataaaactctactatattacgcggtcgatgtcaataatatacaatttgcaaagcggttattggaatatggagcgagtgttacaacatcacgctcgataatcaatacggccatccagaaaagcagttaccaaagagaaaacaaaacgaggatagttgatttattacttagctaccatcccactctagagactatgattgacgcatttaatagagatatacgctatctatatcctgaaccattatcggcatgtatcagatacgccttaatcatagatgatgattttccttctaaagtaagtatgatatcgccggtcatcataaggaactaaagcgctatagagtagacattaatagaatgaagaatgcctacatatcaggcgtctccatgtttgatatattatttaaacgaagcaaacgccacagattgagatacgcaaagaatccgacatttataaactttgtatccaacatcaaatggtacaaaaaagaactaacgtccatcattacagaaactgtaaagaacaatgagaggatcgactccatagtggacaacattaatacagacgataacttgatttcgaaattacccatggagatacaactcgagatactttattactccattaaataatttatcatggagcgataatgtcctgtttcatttgtttccatgacatattacaaaatcgattccgtccaagatgataaaaacatttaccggcatcataaacacggagtttattttatatgtctcgcataaacattactaaaaaatatattgttcggttttctttttctttcacatctttaattatgaaaaagtaaatcattatgagatggatgaaatggacgagattgtacgcatcgttcgcgacagtatgtggtacatacctaacgtatttatggacgacggtaagaatgaaggtcacgtttctgtcaacaatgtttgtcatatgtattttacgttctttgatgtggatacatcgtctcatctgtttaagctagttattaaacactgcgatctgaataaacgactaaaatgtggtaactctccattacattgctatacgatgaatacacgatttaatccatctgtattaaagatattgttacaccacggcatgcgtaactttgatagcaaggatgaaaaaggacatattcctctacaccactatctgattcattcactatcaatcgataacaagatctttgatatactaacggacaccattgatgactttagtaaatcatccgatctattgctgtgttatcttagatataaattcaatgggagcttaaactattacgttctgtacaaattattgactaaaggatccgaccctaattgcgccgacgaggatgaactcacttctcttcattactactgtaaacacatatccacgttctacaaaagcaattattacaagtcaagtcacactaagatgcgagccgagaagcgattcatctacgcgataatagattatggagcaaacattaacgcggttacaaaaatcggaaatacgccgttacacacttaccttcaacagtataccaaacatagtcctcgtgtggtgtatgctcttttatctcgaggagccgatacgaggatacgtaataatcttgattgtacacccatcatggaatacataaagaacgattgtgcaacaggtcatattctcataatgttactcaattggcacgaacaaaaatacgggaaattacaaaaggaagaaggacaacatctactttatctattcataaaacataatcaaggatacggaagttacactctcaatatactacggtatctactaaataggttcgacattcagaaagacgaatactataataccatgactcctcttcataccgcctttcaaaattgtaacaacaatgttgcctcatacctcgtatacatcggatacgacatcaaccttccgactaaagacgataagacggtattcgacttggtgtttgaaaacagaaacatcatatacaaggcggatgttgtgaatgacatcatccaccacagactgaaagtatctctacctatgattaaatcgttgttttacaagatgtcagaattctctccctacgacgattactacgtaaaaaagatactagcctactgcctattaagggacgagtcattcgcggaactacatagtaaattctgtttaaacgaggactataaaagtgtatttatgaaaaatatatcattcgataagatagattccatcatcgaaaaatgcagtcgtgacataagtcgccttaaagagattcgaatctccgacaccgacctgtatacggtattaagaacagaagacatacggtatcacagctatcttaaagccatacattcagacagtcacatttcatttcccatgtacgacgatctcatagaacagtgccatctatcgatggagcgtaaaagtaaactcgtcgacaaagcactcaataaattagagtctaccatcgatggccaatctagactatcgtatttgcctccggaaattatgcgcaatatcataaccaagctaagcgactatcatctaaacagtatgttgtacggaaagaaccattacaaatattatccatgatagaaagaaaatatttaaaaaatatctatataattggagaagtaggaaacaagaacaagacaacgattactacattattaaattatgaagtccgtattatacttgtatatattgtttctctcatgtataataataaacggaagagatatagcaccgcatgcaccatccaatggaaagtgtaaagacaacgaatacaaacgccataatttgtgttgtttatcgtgtcctccgggaacatacgcttccagattatgcgatagcaagactaacacacaatgtacgccgtgtggttcgggtaccttcacatctcgcaataatcatttacccgcttgtctaagttgtaacggaagatgcgatagtaatcaggtagagacgcgatcgtgtaacactactcacaatagaatctgtgaatgctctcccggatattattgtcttctcaaaggatcatccggatgcaaggcatgtgtttcccaaacaaaatgtggaataggatacggagtatccggacacacgtctaccggagacgtcatctgttttccgtgtggtctcggaacatattctcacaccgtctcttccgcagataaatgcgaacccgtacccagaaatacgtttaactatatcgatgtggaaattaacctgtatccagttaacgacacatcgtgtactcggacgaccactaccggtctcagcgaatccatctcaacgtcggaactaactattactatgaatcataaagactgtaatcccgtatttcgtgaggaatacttctctgtccttaataaggtagcaacttcaggtttctttacaggagaaaatagatatcaaaatatttcaaaggtgtgcactctgaatttcgagattaaatgcaataacaaaaatttttcctccaaacagttaacgaaagcaaagaatgatgacggtatcatgccgcatttggagactgtaactctagtgggcgactgtctatctagcgtcgacatctatatactatatagtaataccaatactcaagactacgaaactgatacaatctcttatcatgtgggtaatgttctcgatgtcgatagccatatgcccggtagttgcaatatacataaactgatcactaattccaaacccacccactttttatagtaagtttttcacccataaataataaatacaataattaatttctcgtaaaagtagaaaatatattctaatttattgcacggtaaggaagtagaatcataaagaacagtactcaatcaatagcaattatgaaacaatatatcgtcctggcatgcatgtgcctggcggcagctgctatgcctgccagtcttcaatcattttcatcctcatcctcgtgtacggaagaagaaaacaaacatcatatgggaattgatgttattatcaaagtcacaaagcaagaccaaacaccgaccgatgataagatttgtcaatccgtaacggaagttacagagaccaaagacgatgaggtatccgaagaagttgtaaaaagagatcccaccacttattacagtatcgttggtgcgggtcttaacatgaactttggattcacaaaatgcccaaagattttatccatctctgaatcctctgacggaaacacggtgaatgctagattgtccagtgtgtccccaggacaaggtaaggactctcccgcgatcactcgtgaagaagctctggctatgatcaaagactgtgaggtgtctatcaacatcagatgtagcgaaaaagagaaagacagcgacatcaagacccatccagtactcgggtctaacatctctcataagaaagtgagttacgaagatatcatcggttcaacgatcgtcgatacaaaatgcgtcaaaaatctagagtttagtgttcgtatcggagacatgtgcaaggaatcatctgaacttgaggtcaaggatggatttaagtatgtcgacggatcggcatctaaaggtgcaaccgataatacttcactcatcgattcaacaaaactcaaagcgtgtgtctgaattgataactctattcatctgaaattggataagtagggttaatcgaacgattcaggcacaccacgaattaaaaaagtgtaccggacactatattccggtttgcaaaacaaaaatgttcttaactacattcacaaaaagttacatctcgttacttcttctttttctgtctcaatatgtgatacgatatgatcactattcctattcctattctctcttcgatggtctcataaaaaaagttttacaaaaatatttttattctctttctctcttcaatggtctcataaaaatattaaacctctttctgatgtttcaactatttcgtaaacgataacgtccaacaatatattctcgtagagattatcaatatccctatgcccatctaggttactagacaattgcatcataaaataatgtttataatttacacgttaacatcatataataaacgtatatagtataatattttttggcatataaatgatctagtaaaatccatataggggatactgctcacgttttttctttggtacaaaatttcacacaagtttttatacagacaaatattctcatccatatattttaaaacattaacttttgtactaagaaaaatattaaacctctttctgatggagtcgtaaaaaagttttatctctttctccttcgatggtctcacaaaaatattaaacctctttctgatggtctctataaagcgattgatttttcttaccctctagagtttcctacggtcgttggtcacaca

SEQ ID NO: 11 - DNA, 156 bp, Vaccinia virus
acatttttttctagacactaaataaaaatttaaaatataatattaatgtactaaaactatatattattaatttatctaactaaagttagtaaattatatatataattttataattaatttaattttactatattttatttagtgtctagaaaaaaa

SEQ ID NO: 12 - DNA, 157 bp, Vaccinia virus
acatttttttctagacactaaataaaattagtaaaattaaattaattataaaattatatatataatttactaactttagttagataaattaataatatataagttttagtacattaatattatattttaaatattttatttagtgtctagaaaaaaa

SEQ ID NO: 13 - DNA, 27 bp, Artificial Sequence
  Description of Artificial Sequence: Synthetic primer
ctgtatacccatactgaattgatgaac

SEQ ID NO: 14 - DNA, 32 bp, Artificial Sequence
  Description of Artificial Sequence: Synthetic primer
gagttaatatagacgactttactaaagtcatg

SEQ ID NO: 15 - DNA, 32 bp, Artificial Sequence
  Description of Artificial Sequence: Synthetic primer
ggttctttttattcttttaaacagatcaatgg

SEQ ID NO: 16 - DNA, 25 bp, Artificial Sequence
  Description of Artificial Sequence: Synthetic primer
ttcttattaagacattgagcccagc

SEQ ID NO: 17 - DNA, 25 bp, Artificial Sequence
  Description of Artificial Sequence: Synthetic primer
agtcatcaatcatcattttttcacc

SEQ ID NO: 18 - DNA, 22 bp, Artificial Sequence
  Description of Artificial Sequence: Synthetic primer
atataacggacatttcaccacc

SEQ ID NO: 19 - DNA, 29 bp, Artificial Sequence
  Description of Artificial Sequence: Synthetic primer
gtaacatatacaacttttattatggcgtc

SEQ ID NO: 20 - DNA, 35 bp, Artificial Sequence
  Description of Artificial Sequence: Synthetic primer
ctaatccacaaaaaatagaatgtttagttattttg

SEQ ID NO: 21 - DNA, 23 bp, Artificial Sequence
  Description of Artificial Sequence: Synthetic primer
agtgactgtatcctcaaacatcc

SEQ ID NO: 22 - DNA, 28 bp, Artificial Sequence
  Description of Artificial Sequence: Synthetic primer
tttataaagggttaacctttgtcacatc

SEQ ID NO: 23 - DNA, 23 bp, Artificial Sequence
  Description of Artificial Sequence: Synthetic primer
ttgtgtagcgcttctttttagtc

SEQ ID NO: 24 - DNA, 23 bp, Artificial Sequence
  Description of Artificial Sequence: Synthetic primer
aaacggatccatggtagaatatg

SEQ ID NO: 25 - DNA, 25 bp, Artificial Sequence
  Description of Artificial Sequence: Synthetic primer
tatttgcatctgctgataatcatcc

SEQ ID NO: 26 - DNA, 26 bp, Artificial Sequence
  Description of Artificial Sequence: Synthetic primer
cgatggattcaaatgacttgttaatg

SEQ ID NO: 27 - DNA, 27 bp, Artificial Sequence
  Description of Artificial Sequence: Synthetic primer
atgcctttacagtggataaagttaaac

SEQ ID NO: 28 - DNA, 22 bp, Artificial Sequence
  Description of Artificial Sequence: Synthetic primer
ctggatccttagagtctggaag

SEQ ID NO: 29 - DNA, 26 bp, Artificial Sequence
  Description of Artificial Sequence: Synthetic primer
cggaaaatgaaaaggtactagatacg

SEQ ID NO: 30 - DNA, 29 bp, Artificial Sequence
  Description of Artificial Sequence: Synthetic primer
tgaatagccgttaaataatctatttcgtc

SEQ ID NO: 31 - DNA, 27 bp, Artificial Sequence
  Description of Artificial Sequence: Synthetic primer
tatggatacattgatagctatgaaacg

SEQ ID NO: 32 - DNA, 28 bp, Artificial Sequence
  Description of Artificial Sequence: Synthetic primer
aatacatctgttaaaattgtttgacccg

SEQ ID NO: 33 - DNA, 24 bp, Artificial Sequence
  Description of Artificial Sequence: Synthetic primer
cattttatttctagacgttgccag

SEQ ID NO: 34 - DNA, 20 bp, Artificial Sequence
  Description of Artificial Sequence: Synthetic primer
cgatatgaaacttcaggcgg

SEQ ID NO: 35 - DNA, 29 bp, Artificial Sequence
  Description of Artificial Sequence: Synthetic primer
acaaaacgatttaattacagagttttcag

SEQ ID NO: 36 - DNA, 19 bp, Artificial Sequence
  Description of Artificial Sequence: Synthetic primer
gtccggtatgagacgacag

SEQ ID NO: 37 - DNA, 25 bp, Artificial Sequence
  Description of Artificial Sequence: Synthetic primer
ttagggatcacatgaatgaaattcg

SEQ ID NO: 38 - DNA, 22 bp, Artificial Sequence
  Description of Artificial Sequence: Synthetic primer
tatggaagttccgtttcatccg

SEQ ID NO: 39 - DNA, 33 bp, Artificial Sequence
  Description of Artificial Sequence: Synthetic primer
gacttgataatcatatattaaacacattggatc

SEQ ID NO: 40 - DNA, 28 bp, Artificial Sequence
  Description of Artificial Sequence: Synthetic primer
agatctccagatttcataatatgatcac

SEQ ID NO: 41 - DNA, 30 bp, Artificial Sequence
  Description of Artificial Sequence: Synthetic primer
atgatacgtacaatgataatgatacagtac

SEQ ID NO: 42 - DNA, 29 bp, Artificial Sequence
  Description of Artificial Sequence: Synthetic primer
tgatttttgcaattgtcagttaacacaag

SEQ ID NO: 43 - DNA, 24 bp, Artificial Sequence
  Description of Artificial Sequence: Synthetic primer
tactgtacccactatgaataacgc

SEQ ID NO: 44 - DNA, 25 bp, Artificial Sequence
  Description of Artificial Sequence: Synthetic primer
gatatcaacatccactgaagaagac

SEQ ID NO: 45 - DNA, 27 bp, Artificial Sequence
  Description of Artificial Sequence: Synthetic primer
atcttaccatgtcctcaaataaatacg

SEQ ID NO: 46 - DNA, 24 bp, Artificial Sequence
  Description of Artificial Sequence: Synthetic primer
atagctctaggtatagtctgcaag

SEQ ID NO: 47 - DNA, 25 bp, Artificial Sequence
  Description of Artificial Sequence: Synthetic primer
gcgaactccattacacaaatatttg

SEQ ID NO: 48 - DNA, 28 bp, Artificial Sequence
  Description of Artificial Sequence: Synthetic primer
gatgtttctaaatataggttccgtaagc

SEQ ID NO: 49 - DNA, 212633 bp, Horsepox virus
tttattaaattttactatttatttagtgtctagaaaaaaatgtgtgaccaacgaccgtaggaaactctagagggtaagaaaaatcaatcgctttatagagaccatcagaaagaggtttaatatttttgtgagaccatcgaaggagaaagagataaaacttttttacgactccatcagaaagaggtttaatatttttcttagtacaaaagttaatgttttaaaatatatggatgagaatatttgtctgtataaaaacttgtgtgaaattttgtaccaaagaaaaaacgtgagcagtatcccctatatggattttactagatcatttatatgccaaaaaatattatactatatacgtttattatatgatgttaacgtgtaaattataaacattattttatgatgcaattgtctagtaacctagatgggcatagggatattgataatctctacgagaatatattgttggacgttatcgtttacgaaatagttgaaacatcagaaagaggtttaatatttttatgagaccattgaagagagaaagagaataaaaatatttttgtaaaactttttttatgagaccatcgaagagagaataggaataggaatagtgatcatatcgtatcacatattgagacagaaaaagaagaagtaacgagatgtaactttttgtgaatgtagttaagaacatttttgttttgcaaaccggaatatagtgtccggtacacttttttaattcgtggtgtgcctgaatcgttcgattaaccctacttatccaatttcagatgaatagagttatcaattcagacacacgctttgagttttgttgaatcgatgagtgaagtattatcggttgcacctttagatgccgatccgtcgacatacttaaatccatccttgacctcaagttcagatgattccttgcacatgtctccgatacgaacactaaactctagatttttgacgcattttgtatcgacgatcgttgaaccgatgatatcttcgtaactcactttcttatgagagatgttagacccgagtactggatgggtcttgatgtcgctgtctttctctttttcgctacatctgatgttgatagacacctcacagtctttgatcatagccagagcttcttcacgagtgatcgcgggagagtccttaccttgtcctggggacacactggacaatctagcattcaccgtgtttccgtcagaggattcagagatggataaaatctttgggcattttgtgaatccaaagttcatgttaagacccgcaccaacgatactgtaataagtggtgggatctctttttacaacttcttcggatacctcatcgtctttggtctctgtaacttccgttacggattgacaaatcttatcatcggtcggtgtttggtcttgctttgtgactttgataataacatcaattcccatatgatgtttgttttcttcttccgtacacgaggatgaggatgaaaatgattgaagactggcaggcatagcagctgccgccaggcacatgcatgccaggacgatatattgtttcataattgctattgattgagtactgttctttatgattctacttccttaccgtgcaataaattagaatatattttctacttttacgagaaattaattattgtatttattatttatgggtgaaaaacttactataaaaagtgggtgggtttggaattagtgatcagtttatgtatattgcaactaccgggcatatggctatcgacatcgagaacattacccacatgataagagattgtatcagtttcgtagtcttgagtattggtattactatatagtatatagatgtcgacgctagatagacagtcgcccactagagttacagtctccaaatgcggcatgataccgtcatcattctttgctttcgttaactgtttggaggaaaaatttttgttattgcatttaatctcgaaattcagagtgcacacctttgaaatattttgatatctattttctcctgtaaagaaacctgaagttgctaccttattaaggacagagaagtattcctcacgaaatacgggattacagtctttatgattcatagtaatagttagttccgacgttgagatggattcgctgagaccggtagtggtcgtccgagtacacgatgtgtcgttaactggatacaggttaatttccacatcgatatagttaaacgtatttctgggtacgggttcgcatttatctgcggaagagacggtgtgagaatatgttccgagaccacacggaaaacagatgacgtctccggtagacgtgtgtccggatactccgtatcctattccacattttgtttgggaaacacatgccttgcatccggatgatcctttgagaagacaataatatccgggagagcattcacagattctattgtgagtagtgttacacgatcgcgtctctacctgattactatcgcatcttccgttacaacttagacaagcgggtaaatgattattgcgagatgtgaaggtacccgaaccacacggcgtacattgtgtgttagtcttgctatcgcataatctggaagcgtatgttcccggaggacacgataaacaacacaaattatggcgtttgtattcgttgtctttacactttccattggatggtgcatgcggtgctatatctcttccgtttattattatacatgagagaaacaatatatacaagtataatacggacttcataatttaataatgtagtaatcgttgtcttgttcttgtttcctacttctccaattatatagatattttttaaatattttctttctatcatggataatatttgtaatggttctttccgtacaacatactgtttagatgatagtcgcttagcttggttatgatattgcgcataatttccggaggcaaatacgatagtctagattggccatcgatggtagactctaatttattgagtgctttgtcgacgagtttacttttacgctccatcgatagatggcactgttctatgagatcgtcgtacatgggaaatgaaatgtgactgtctgaatgtatggctttaagatagctgtgataccgtatgtcttctgttcttaataccgtatacaggtcggtgtcggagattcgaatctctttaaggcgacttatgtcacgactgcatttttcgatgatggaatctatcttatcgaatgatatatttttcataaatacacttttatagtcctcgtttaaacagaatttactatgtagttccgcgaatgactcgtcccttaataggcagtaggctagtatcttttttacgtagtaatcgtcgtagggagagaattctgacatcttgtaaaacaacgatttaatcataggtagagatactttcagtctgtggtggatgatgtcattcacaacatccgccttgtatatgatgtttctgttttcaaacaccaagtcgaataccgtcttatcgtctttagtcggaaggttgatgtcgtatccgatgtatacgaggtatgaggcaacattgttgttacaattttgaaaggcggtatgaagaggagtcatggtattatagtattcgtctttctgaatgtcgaacctatttagtagataccgtagtatattgagagtgtaacttccgtatccttgattatgttttatgaatagataaagtagatgttgtccttcttccttttgtaatttcccgtatttttgttcgtgccaattgagtaacattatgagaatatgacctgttgcacaatcgttctttatgtattccatgatgggtgtacaatcaagattattacgtatcctcgtatcggctcctcgagataaaagagcatacaccacacgaggactatgtttggtatactgttgaaggtaagtgtgtaacggcgtatttccgatttttgtaaccgcgttaatgtttgctccataatctattatcgcgtagatgaatcgcttctcggctcgcatcttagtgtgacttgacttgtaataattgcttttgtagaacgtggatatgtgtttacagtagtaatgaagagaagtgagttcatcctcgtcggcgcaattagggtcggatcctttagtcaataatttgtacagaacgtaatagtttaagctcccattgaatttatatctaagataacacagcaatagatcggatgatttactaaagtcatcaatggtgtccgttagtatatcaaagatcttgttatcgattgatagtgaatgaatcagatagtggtgtagaggaatatgtcctttttcatccttgctatcaaagttacgcatgccgtggtgtaacaatatctttaatacagatggattaaatcgtgtattcatcgtatagcaatgtaatggagagttaccacattttagtcgtttattcagatcgcagtgtttaataactagcttaaacagatgagacgatgtatccacatcaaagaacgtaaaatacatatgacaaacattgttgacagaaacgtgaccttcattcttaccgtcgtccataaatacgttaggtatgtaccacatactgtcgcgaacgatgcgtacaatctcgtccatttcatccatctcataatgatttactttttcataattaaagatgtgaaagaaaaagaaaaccgaacaatatattttttagtaatgtttatgcgagacatataaaataaactccgtgtttatgatgccggtaaatgtttttatcatcttggacggaatcgattttgtaatatgtcatggaaacaaatgaaacaggacattatcgctccatgataaattatttaatggagtaataaagtatctcgagttgtatctccatgggtaatttcgaaatcaagttatcgtctgtattaatgttgtccactatggagtcgatcctctcattgttctttacagtttctgtaatgatggacgttagttcttttttgtaccatttgatgttggatacaaagtttataaatgtcggattctttgcgtatctcaatctgtggcgtttgcttcgtttaaataatatatcaaacatggagacgcctgatatgtaggcattcttcattctattaatgtctactctatagcgctttagttccttatgatgaccggcgatatcatacttactttagaaggaaaatcatcatctatgattaaggcgtatctgatacatgccgataatggttcaggatatagatagcgtatatctctattaaatgcgtcaatcatagtctctagagtgggatggtagctaagtaataaatcaactatcctcgttttgttttctctttggtaactgcttttctggatggccgtattgattatcgagcgtgatgttgtaacactcgctccatattccaataaccgctttgcaaattgtatattattgacatcgaccgcgtaatatagtagagttttattctcattatcgatcatatctatattatccatgtacttgcttagtatatcaaatacatctattagtatggtttcataacagtgatacccgcaattattaaatctcgataatatcagaccgtacatacatagacggccattgttagatatgtgatttacagccgcgtgtccatattttccacgataaaccttacgacgtttacatcgacgagattattattaacaaagtagtcgtgagaggatagttgttgtccgttgtcttatccatggtcgctccgttatctaacatgcatcgaacgataggtatacttaccatatcgccgtaatgtaagtagtttatcaacatggcttgtacgatggattcatcctgttgtctaaatctctttagaatgttatcaatgatgtagtggttatattctctggaatcgtacgaagtaatactacgcattacgtcgacaagagtatgacgtctctcaataagaagattaacgatttccatgtctacattatatggggttactctaaatcgcttgtttagataatccgctaatacgcctctaatatagggctgactgacgtcgtcgtatactctacacgtgtccacatcctttattaataataatttaacaatctctatatctatggttgagaaagaccagtagtattggatgggtaaagatcctccttcgtctctgccatggatggaaacattgttattgatcaaacatttaattacatccttggatagagattgagattgagattctctatgagacgatatatagtaatgaagagagttcttacacatatcactgttgtacatacaggtacgaaatacgtaaccggtgctgtaacattctgatttaagaagccatagcaatacttctggtctcggattaggcgtcgttacgtatatatccaccaatccgagactattgtttgcataattcgtattcttggacggacgtatccgtttatccacaattaggtattttagcagacgtaagtcgatattatccgaagacatatacgaatacagatcgaaatcatttatattcgacttgagtttgttagaggaattcgaatagctggatatcagtagatgcacaatttgagatttgacgtatctatgcttactgtatactcctagcggagttaatccttcgttgtttctacaaagtctctcgactccgcgagagagtaacagccgaacaatcttaatgtctgtatcgcatttattgaagacgtaacaatgtagcgcattgtttcctcgtctatctatatgttttgataagttgtgacacgtttcaatttctagttttattttttcgtacgtcacatcttcatccagtagacgacatagaatacatgtgcaatctctgacgcaatccatagctattctggtgctaattattcctatattatatttcacgaaaaatgatgaaggcaatcattcctcataagatgataaaaagtaaggtgggtgtgataaaaagtgtagtgagtgagtgagtgagaaagtaagagtattagtgagagagcatgaaggagatttagtatttagcagtgcggatatgatccaagagggtgagatagtcgttttcgttcagaatctttcgcagcataagtagtatgtcgatatacttatcgttgaagactcttccagagacgatagctgattgagtacaaagtccaatgattgcacgaagttcttcggcggttttcatggagtcatttctgatgaaacatttaatgatctccacgcaattgtcgatattgtcccacggaagtgaatccgagaactccttcaactcaccaccaaagagctccgttgcatcagttctgaaagagatgagaagcctgtagagagaccctgcgctttctctatgggtccatctatgagaaacccacaggatgtattcagtcagacaatgtctgacgtcggccacggtatacagggagtccttagtagcgtggcaatgacagggtctgaactgggcacaaggaaaggccattgtaaaggtagacgaaggttaacctgatggtagacctgtagccgtctatgctaatagagggctttaatttccatttttttaatgggttgtggatgaggaatgagagtgtcttatttcgtccttggtttacatggatcagagtgagaaaaaaatatcttgtatattattaactaacaaccttggtttccaaatagcttaagaaggcatttacacataatggagatatattccagcagaaaactggataaccgtccaaagtattatttgatatagtagtttttgatataatagacgcgaccccaatagcagtttttgtaaattgaacagggtctatactatgagtaacgtctgatttctgtttaagtttcgtatacaagtcaatgttatagacataatccatatcagagttagagtcataaatatcttttagtacagtaacgcgcatatcatgtataaatggttccccatacgtttcaattgctaagtcctcataagtcgtaaactctttgaatattggtcccatatcatcaatgtttagattatgtacaattctcaaatacgctttgacaagattataaaaccctcttacttgagttttagctacgataactgaaaatggcatatatttgataaactcctaaaagaataattttgtcagggctccatctctcatcaagttacatgtatttgtaataacgtcatttacagtactatttttttgtaaatctaaatttttaatgattctattaacttcttgattattcatggccttaatagcattggatattttatcatccatgtttaaaaaataacctatatgttaatacttgatattgatattaataattagtataattactatgtattatatttcattattatgaggaggatttatgtcatatcatgaaattaataagagaactagattaaagtaatagtaataggaataggaataggaattacttttcgtttgtctcactattataaaaagatgttatatctcaatcactgctataaagatccatcatatactatgatactgtatcagtttctatcaatctctgttttgggtgaattcaaaaaaaattaataatacctagaaaatattccatgagcatttcttttatcgatatagcatttggatagcctgtcaatatcgacatcattgaacaacggattcatcttacacttttcacgaacatcctgagatacattgttccatcttataacccgaattagatcattgtcttcagggaacttagttagccaatcaagaataatatcaatgacctcatcttctttgacatctagatagtcgcagtttatgatattaaacatagaatctgctgatatcaattgtttgaatctaacatccttatacaatgtttcaatctcattagcaatgttttcctcaatcatagtcatgacattgtatttatcctccatttccttatatctattgctaaacaactcatacatctcaagagcgtttctttcatctatcatataatgaaagatacgaactgttgcatggcccaagatctcagaatcaaggaagcgagcaagatcaaacatttcaactacatcttccaactcaagattatccatgactcctgtgtatatgaaatcaatggccatctcgataacaaaacctgaataatcaatattgaagattttttgatctggatcattacttagcatctcagcaaagtatgtagaaaatccagatacagccaccttatgtgcgataatgtcgttgttatcttttgtgtggaatgttatatcacaaaactttccagattttctaagattattcatattgctagctagatcatatctatgtttcacacacaattctttctcatgttcgttaaggtcgtacccacgaacaaaatagtaatcactcattctgacgacagcataaacagtaactaatttttctatctttagagagtatctccctattacctcattatgataatgtgtaaatagatacttcttaataatgtatagatgctgtctataaaaaaatcattcatgggtttgtgtttggacgcttttcatagactgtagtaagtggtcaatattacatcctatgtaatcaatagcagggttagttgcataatatttcatatacaagtcacgcacgatagctatctatctaattaattgttctagtcgcacacatatttggaggtatatagctaatatcgattatgtttcctatatgaatagtagcagtatcctcttcaaatccctcattggtattgacatacgcgatagagatggagatctgatagacagttgcctattaaagtgaaattttcagcgtgtgttgatgctttttcaggaacgcgtgtaaaattaccgattaatacaggttccgtttcagcgttacattttacttttatattcagcgtacacatcttggatgtattttgtttttttgtagtatctgtaaaaagtcctgctatagcagttttaccctttacagagtaatattctgttacaaagactggattgcaatctgttctattaacagtaattgtcaatttagaagtcgtgataacatctgatgattgttttgtacttagtcgattacaagatgatacgttaactggatatagttcaaaatctagagaaatgtagttaaatgtagttaaatgtatctgtaatgtatttgtcttcaaagaaaccgggtgtaggataatcatttgcaaacgatgtaacaaataataatgcgaatattagtattgtgtttatgtttatgtttatcatgatgagtatttatgataacaaagttttgtattatccggagtggtacagcattggtcggttggttctattttctttattgtggtatcaggagtacatctggcacaactattgactgcaggtaccgtacattttaatcctggaccacattgacattttcgtggtttattaggtccacatggttgtatctctaccatattgcttaaacaagtaacacacgccgtacataaaccatcttcaggttcaagatagtaatcattaggacacgttttaccaaatgatgtatatactaggcaggttacgatagcggataaaaagatagtattcatcttcatgctatttaatacatctaatatatgtattagttattaaaaaaatattattttatagaaactttgtgtgtgtatccagaacaattttatcttagtcactctttatctgtaagtcgagcattgataaatgtggcatgttgtctgttaattattatttttttaaaatacgttagtctaaatatcccgataatgcaactaaataaaagagtaacgggaatacgcataacgggatacatatccatgatatattttaatatgtcattggctatataatacatatatcgcgcatctgttatgtacgtattaattatatcatataatggatcattaccatgacaacacgctactagattgtgattttccctatatgcgattatgtcctctttgtaacatttaccaactagtatatcgtatatgctaatattagttctcgaattaatgtgtaactttgtcaacttatcgatgttatttctaatgctaactaacttatcaaatgccaaaaacattgcatgactattatcgagaatcgctatatccctctccatatactcgatgcatttattacagtaatccaatccagctaacataagagccaatctcaatgttggtttaatgatatcatgttcacataataataacgatggaaactttccactagtgtaacacttatctaagaatgatataaccatgtttacattaggtctcttatcgagaatattcttaacaagataccattggtggcccgacaacatattattttccatggttaacattagaggatctacaccattttttgttggtgtattaatattggcttgaatggataataagtaccacaaatgaatccatgacaatattggcattagtatgtgagataatagatacatgtaatggtgtcataccagatgttttacatactgcgttattatatctttctataatagcacaatgatatacgtcatgtatatttgtactatcgtacggctcatattcatcagtatataagttagtaggtatattatatttagcaacaatatgatgaataatgcatggagtgtcggctactctaattaatagatcctgaagtatgcgattttttaccatattcaatactttattagatatcaggcaatctattatgtcataatacatataattttgagcagtgcatatatatgaagttaatggagtataccctaaacaattgacggctgttatatcagcacccaaggatagcagacactgaataacatctcttatatcgttatcggtttttggatctaatatatgaacaacagacaacatagagagatatgtgtgtagtaccatattaccaatattgtcgggttcatttatatcattcccgtactcgtgtaaaagtttaatgatgctagtacttatgttgtgtcgcagaatatattgatgaagacaagtccttccagcactatctttataatgtagttttattcctggttgtaaaaaggagtaaacgactgatatatcgatattccgagctagtgttatatacgagtggagcatcataggtatattttttactttattgccatctagtgattctatatacaagtttgttatttttggattaatattatctatattggctatgtatatcataatcggactcattccattaacgcatttcatatccatatctccccaagttcgataatctttttaattacgtgtacacaaacatttcctgttatcatgtacgtgtgcaacggagtgataagatcacgattctgtaaatttacatttactccgttattgcataaccactctaatatatctatatcaacatccatgttgccgagatacgcgtgtaggataccgtatcctgttttcttgcatacataattaagatttacaattcctacatctaccatatatttagtcaagtctagttttatatggcgagttctcggtgaattgaaatacgtatatagaatatccatatctccattgttgggaatattaaacacatgattggtggttttacttttattatctttaataatacatttgacgaattttttatactgatcaaccaacgatttgttttttctatccgcttttagcattaaagtcatactaccgatgatattaatcaatgcggttttactatctgtatactgttcacgttgtctattatcaatacaataatatttctttttaaaaacttttatgcgtttagctctaactatgtgattataactgtatatatccccatcgctacagtatccatcatctggatcatcattatttatacgagcattagtgcttatacggttatcaaaatcttcaaagtatgtcgaatatatcagttttctgacattaactatagcgtgttcggttaatgatgctattttgataactataatcaaaaactgtcagtgtgttggtagtgcataaaaagtttatattattgttacattttttaaaaagatcaaggtataaaaattagaagtgttagattatattaattatactataaaaattagaagtgttagactattaactaacttataaaactatcttataaaactatcttataactattaactaacttataaaactatcttataactattaactcatttcaagaagggtgggtggagaaaactctatatgatagcttgtgaaacaattagatccctaatttctaatggaagttttgataggagattgtcatcagttgatacattgtttattatctcatctattagagcacgtctgtttagagctttagtgacatgctcgtttacttctgtgtaaatcttgaatcctttagtgatacactgtgtcaaaactggatgtttagaatacctatgtagaatatgggaagcatgcttgtttttgtccttattatagattaactcatacatggttgtattatgaattttcatctgcctaatgtactccaattcttgtttacaatcaattatataatcaaagagtgatgatgcatacacattacaaagtgaataatctaccatcataaaatacttgatacagagctttattacatcatggttttcaattgtattattaagtatagataattttatacagtcaatagacaatggttctctaagcaatatttctaatattttaagatgtgcttccctactggcgataacagatcccctatccacagccacgtcaagacatgtatatccatcactcattactgcgttgacatttgctccattttctaatagccatgatactaaatctatataacctgcatagatagcgcgataaagcaaggtccttccaccagcatctagttgattaatatcttcaatatatgggatacaaagcttacaaatttctaatactgtgggttcatctacaaggaatcccctagtatactgaattattttatataaatctaacttaacatcattttcatctgggataccacaatttaaaataaactcaacaacactactttcctttttacacattcccctaaaataggcattcaagcattctattttatatattacagccccatgatctaccataaaattaacaatgtctatttttacatatgcattagatagatagtaaagtaagagatcttgcacagaattacaattcttaataattataaagataatatcttccatataattctttgacactaatgcagatataatatctttatatgtaatatatgtaaacagtctatctactatatactgatcaatattatctctatgaatcctaaaataatcatacagaacatctacaggatcacaaattggttcaaggagaaatctatcaaatattttcctgtcaacaactggttctagaacataacagtcaacacccaatccatgttttacatagtcatctaccaaagataatgaccaaatgttgaggtcgtcgtgaaactgctcatcaacagccatgaaatctgccgactccatggtgcgaatcgcactgtcttattcgccattgattttcattttttataattatgtacatgatttccttctattctcaagagtctacaaaatatatattttttcgatatctaagtactaagttttttactgtttttgttactgtcccattcttctaactaaagatctgagataaattatacaatcttcgctatcaaaccatttttgtagtttaaagcctgaagtaattagccaactgtttttattagcggcttttttcgatctatcaatttcagtatattcttcgctgttataaaagtaatgttgtttaattgtaggacggttgttagtataatcacatgaataataatattctaattcctcgtattaactacttacagatactcgaaatagtctgaaaaattcttcaaagatatttttataaagatctaggaaaagtttattaccaaccatgaacgcgataaatggataaatatcctttccatcaaaggtcataattggataattgtccagcaatatatctgctgtattagttatatcacttccatttattttcagattgaagtaatgtactagtttgtgacaattaacaagagacaaaagagatgccgatactaatacgtaaatagctatacgcgaatccattgttacttttttatttcatacgtctattaataaatatatgtattacttaagactagaaaaatcaaaagtgagtttttgatatttgattcttacttattgtgggattgtagtttactaagtaattcatctctgaatcctgataaatcatgcatatcattgatacaactacgcagtaaactagtaggaatacaaatatctggatatgtacgtaaatagtcgattatatcttttacaatactattagtccctattgcgttatctatatatccattaataatattacacagtggatacttatcagaagtatacctcttacagatttctatacataaagtaatatcattattgtatgttttgcttattagtatcatatataaatatagtagaatagttgttaatatatgtagacattaataaactaatattatctcgaatatccactatcacgtctaaagtttgactcagtgatctataattagatgtattttgtgtttccaaatcatgttttatatgctcgataaatttgttacaattatttactcctatcaacataaatgcagaggccatcatttcatacaggctagtatttttagtactacataacgaaaataatgattcgtttttatagcatttatctaaaaatattataatattatctatagaaggtctgttatctagtaacatcttaactatatgacacttattatatcgatctctatgaaatattaacatcaatgcagaaataccctttatagttggtttatcgatactatatccaatagataataaatatttcattgcatctttgagtagacaaacggtggctacgtgaaacgcagtcattccagaaaatggtactatattcttatagtactttatcatttgacaatgatatgcatcattagtttcgtaatcacacttttcatattcatcggtgtatgagtctacaggaatattatatttagtaataacatgatgaattattggcagcgatatatcttctctagttattagatcttggattatacaatgctttaccatgtttaatactttatcagacatcagacaatctattatgtcgtgatacatataattttgtgcggtacatatgtaggacgttaatggggtataacctaaattattaaccaacgatatatctgatcctgaacgtataagatatttaacaacttttatgtttatattgttattgatactcgaatcatatgtcaaattttattaacgatacataaatctagaaagatatgtgtgtagtactgtattacctaaattatcagtctcgtttaaatagttgccgtgttcgagtaaaagtttaacgacatcgatatttatataatttcgtaacatatagctgtgaagacaagtttttccaacactatctttgtaatcaaggattgcactattattcagaaaatgttttatgacatctagatcaacatattgagccatttgtatatacagatacaatatctctggtatattagttatcttgttatcgtccatgtaaatctttataatttcttcgtctatattcatcgcattatatattatataagttattataggagttaactttatacaacatctgagattcctatcagcacctagttcaataactttctttaacacgcttgctgaaattaattcgtctctccgtaaatatgaatgtaatggagtaattagattattgttttgttcatttatattctttccacttttacataataattttagtacatctgtgtctacatacatattaccgagatatgtatgcaatataccaaatccatattcgtttttataattaatatctacgcctttagcaatcatccatttaaccaattttatgttgatgcctatcgtgttatgtgctttgaaatatacagagaatatgttactactatatttgtcactgttttcataatgactatctcgtcctcatcatcactatcatcactatcatcatccttcgttcttattatcatctttatcatcatccttattgtccttatcatcgtctattaaacacaaattatctacgtttataacaacattctcatcattaattagttctgtagtaatatctttaataatttggctatatatctgttcaatactatctattgatgatttctttttatgacttgaactaatgtaatgacgatgaaattgagtagtagcttttaataaagacttgatatcattatcatatgtttgatcgtcgtaattaatagtgtggctaatggtactgttaataagtttatagacaatatcatagtattttctttccagaactagattattttttaatactgatctaacatatatgtcgtaactatcatactggttctcacaattccgtgatgtagcagtagttgatgcatggtctatatcgttaaaatgtatcgtatataatagttttctgacgtggagtacagaattttcgattaatgagttcatggtaaggaagggcgaatgaatgcctgtatatatgcataagttaatagttttttatcatatttttctaatactatataaaaatatcattatgtataatcatcactgtcgctatcattattgtgtttgtgtagttctgtcctatcatctacatcactgctactgtcactctcgctatatcttctaaaattacaaacaactggatattcgataacagcatttgagtagtttttgtcttttacagtatatacgttattgtcaaaatctaaacaaatattagcataatacctatctataagatcaagatccatgttcgagcatactagtgcatatttgtaacttcgtcgtacagcgttagatcaataaataaacaatcttataacgcaactttttacgatctagttgtatgagtttatcgtttacataagctattaacggctttaacagatgatctgagtaatatacctctgttatacatttaatgttcacggtcttagtatttttagatatcaattgtaatttacacccatatttaactcccttgtgtaacgttagacattctaaatctatagtattatctattacagcgtaaaacacatacatttttaacagcaacacattcaatattgtattgttatttttatattatttacacaattaacaatatattattagtttatattactgaattaataatataaaattcccaatcttgtcataaacacacactgagaaacagcataaacacaaaatccattaaaaatgttgataaattatctgatgttgttgttcgctgctatgataatcagatcattcgccgatagtggtaacgctatcgaaacgacattgccagaaattacaaacgctacaacagatattccagctatcagattatgcggtccagagggagatggatattgtttacacggtgactgtatccacgctagagatattgacggtatgtattgtagatgctctcatggttatacaggcattagatgtcagcatgtagtattagtagactatcaacgttcagaaaacccaaacactacaacgtcatatatcccatctcccggtattatgcttgtattagtaggcattattattattacgtgttgtctattatctgtttataggttcactcgacgaactaaactacctatacaagatatggttgtgccataatttttataaatttttttatgagtatttttacaaaaatgtataaagtgtatgtcttatgtatatttataaaaatgctaaatatgcgatgtatctatgttatttgtatttatctaaacaatacctctagctctagatattatacaaaaattttttatttcggcatattaaagtaaaatctagttaccttgaaaatgaatacagtgggtggttccgtatcaccagtaagaacataatagtcgaatacagtatccgattgagattttgcatacaatactagtctagaaagaaatttgtaatcattttctgtgacggaagtccatatatctgtatcatcgtctagtttatcagtgtcccatgctatatttctgttatcatcattagttaatgaaaataactctcgtgcttcagaaaagtcaaatattgtatccatacatacatctccaaaactatcgcttatacgtttatctttaacgatacctatacctagatggttatttactaacagacattttccagatctattgactataactcctatagtttccacatcaaccaagtaatgatcatctattgttatataacaataacataactcttttccgtttttatcagtatgtatatctatatcaacgtcgtcgttgtagtgaatagtagttattgatctattatatgaaacggatatgtctagaacagcaattgtcttacgtccagttaacactttctttgatttaaagtctagagtctttgcaaacataatatccttatccgactttatatttcctgtagggtggtataattttattttgcctccatatatcggtgtttccaaatatattactagacaatattccatatagttattagttaagggtacccaattagaacacgtacgcttattatcatcatttggatcgtatttcataaaagttattgtgttatcgatgttaacacattctacattttttaattgtctatatagtatttttttgatattttctataatatcagaattgtcttccatcgaaagttgtatactatcagaatcagttacatgtttaaataattctctgctgtcattccttatacaatcaaattcattattaaacagtttaatagtctgtaaacctttatcgtcgtaaatatccattgtcttattagttacgcttatttttatgtgtttttacgttgctttattatattttataagaatgattgtttgacgaatcacgagaactattaagacatatattattagaggtatatattataaaaaagtttttgattacgttgttataagaggagaggacacattaacatcatacatcaattaactacattcttataacatcgtaatcaaaagaattgcaattttaatgtataacaactgtcaatgggttatggaattgtatattacatattatacggtatgttggtaacgacaaataccgatcggtaatcgtttgccggtgtaataaaattatatatatctatctattacaccggctgagtatgcataataataagttgtgggtagtatcatccacatatttataatttaggactttgtattcagtatttttggaatcataaaaaaataaaaaagttttaccattttaaaatttaaaaagtatttacattttttcactgtttagttgcggatatggaatttgatcctaccaaaatcaatatatcatctatagatcatgtaacaatattacaatacatagatgaaccaaatgatataagactaacagtatgcattatccaaaatattaataacattaaatattatatcaatatcacaaaaataaatccacatttggctaatcaatttcgggcttggaaaaaacgtatcgccggaagggactatataactaacttatctaaagatacaggaatacaacaatcaaaacttactgaaactatacgtaactgtcaaaaaatagaaacatatatggtctatatatacactacaatttagttattaatgtggttattgattggataaccgatgtgattatcaatcaatattaagagggttggtaaattggtacatagctaataatacctatactccaaatacacccaataatacaacaaccatttctgagttggatatcatcaaaatactaaataaatacgaggacgtgtatagagtaagtaaagaaaaagaatgtgaaatttgctatgaagttgtttactcaaaacgattagaaaacgatagatactttggtttattggattcgtgtactcatatattttgcataacatgcatcaatatatggcataaaacacgaagagaaaccggtgcgtcggataattgtcctatatgtcgtacccgttttagaaacataacaatgagcaagttctataagctagttaactaataaataaaaagtttaatttgttgacgacgtatgtcgttattttttctcgtataaaagattaatttgattctaatataatctttagtattggataaatatcaattcaaattaattccattagattatatcataaataaaaatagtagcacgcactacttcagccaaatattcttttttgaaacgccatctatcgtagtgaggacacaagtgaacctataatgagcaaatttattagtatcggttacatgaaggactttacgtagagtggtgattccactatctgtggtacgaacggtttcatcttctttgatgccatcacccagatgttctataaacttggtatcctcgtccgatttcatatcctttgccaaccaatacatatagctaaactcaggcatatgttccacacatcctgaacaatgaaattctccagaagatgttacaatgtctagatttggacatttggtttcaaccgcgttaacatatgagtgaacacacccatacatgaaagcgatgagaaataggattctcatcttgccaaaatatcactagaaaaaatttatttatcaattttaaaggtataaaaaatacttattgttgctcgaatattttgtatttgatggtatacggaagattagaaatgtaggtattatcatcaactgattctatggttttatgtattctatcatgtttcactattgcgttggaaataatatcatatgcttccacatatattttattttgttttaactcataatactcacgtaattctggattattggcatatctatgaataattttagctccatgatcagtaaatattaatgagaacatagtattaccacctaccattatttttttcatctcattcaattcttaattgcaaagatctatataatcattatagcgttgacttatggactctggaatcttagacaatgtacagtcatctataatcatggcatatttaatacattgttttatagcatagtagttatctacgatgttagatatttctctcaataaatcaatcacataatctaatgtaggtttatgacataatagcattttcagcagttcaatgtttttagattcgttgatggcaatggctatacatgtatatccgttatttgatctaatgttaacatctgaaccggattctagcagtaaagatactagagattgtttattatatctaacagccttgtgaagaagtgtttctcctcgtttgtcaatcatgttaatgtctttaagataaggtaggcaaatgtttatagtactaagaattgggcaagcataagacatgtcacaaagaccctttttgtatgtataagtgtaaaaattataacattcatagttggatttacataggtgtccaatcgggatctctccatcatcgagataattgatggcatctcccttccttttttagtagatatttcatcgtgtaagaatcaatattaatatttctaaagtatccgtgtatagcctctttatttaccacagttccatattccaacatgcattccactagagggatatcgatatcgccgaatgtcatatactcaattagtatatgttggaggacatccgagttcattgttttcaatatcaaaaagatggtttccttatcatttctccatagtggtacaatactacacattatttcgtgcggctttccattttccaaaaacaatttgaccaaatctaaatctacatctttattgtatctataatcactatttagataatcagccataattactcgagtgcaacatgttagatcgtctatatatgaataagcagtgttatctattcctttcattaacaatttaacgatgtctatatctatatgagatgacttaatataatattgaagagctgtacaatagtttttatctatagaagacggcttgattccgtgattaattagacatttaacaacttccggacgcacatatgctctcgtatccgactttgaatacagatgagagatgatatacagatgcaatacggtaccgcaatttcgtagttgataatcatcatacgcgtatcagtactcgtcatcctcgtcctcataaagaacactgcagccattttctatgaacaaatcaataattttaggaacaggatcattgtcattacataattttctataactgaacgatggttttcacatttaacactcaagtcaaatccatgttctaccaacacctttatcaagtcaacgtctacatttttggatttcatatagctgaatatattaaagtcatttatgttgctaaatccagtggcttctagtagagccatcgctatatcctttaactttaacatgtctactatttgtgtattcttctaatggggtagctgtctccaatttttgcgtaatggattagtgccactgtctagtagtagtttgacgacctcgacattattacaatgctcattaaaaaggtatgcgtgtaaagcattattcttaaattggttcctggtatcattaggatctctgtctttcaacatctgtttaagttcatcaagagccacctcctcattttccaaatagttaaacattttgactgaatagaagtgaatgagctactgtgaactctatacacccacacaactaatgttattaaatatcattttttgaatgtatttataccatgtcaaaaacttgtacaattattaataaaaataatttagtgtttaaattttaccagttccagattttacacctccgttaatacctccattaaccccactttttacaccactggacgatcctcctccccacattccaccgccaccagatgtataagttttagatcctttattactaccatcatgtccatggataaagacactccacatgccgccactaccccctttagaagacatattaataagacttaaggacaagtttaacaataaaattaatcacgagtaccctactaccaacctacactattatatgattatagtttctatttttacagtaccttaactaaagtctctagtcacaagagcaatactaccaacctacactattatataattatagtttctatttttataggaacgcgtacgagaaaatcaaatgtctaatttctaacggtagtgttgataaacgattatcgtcaatggatacctcctctatcatgtcgtctattttcttactttgttctattaacttattagcattatatattatttgattataaaacttatattgcttattagcccaatctgtaaatatcggattattaacatatcgtttctttgtaggtttatttaacatgtacatcactgtaagcatgtccgtaccatttattttaatttgacgcatatccgcaatttctttttcgcagtcggttataaattctatatatgatggatacatgctacatgtgtacttataatcaactaatatgaagtacttgatacatattttcagtaacgatttattattaccacctatgaataagtacctgtgatcgtctaggtaatcaactgtttttttaatacattcgatggttggtaatttactcagaataatttccaatatcttaatatataattctgctatttctggaatatatttatctgccagtataacacaaatagtaatacatgtaaacccatattttgttattatattaatgtctgcgccattatctattaaccattctactaggctgacactatgcgacttaatacaatgataaagtatactacatccatgtttatctattttgtttatatcattaatatacggcttacaaagttttagtatcgataacacatccaactcacgcatagagaaggtagggaataatggcataatatttattaggttatcatcattgtcattatttacaactaagtttccattttttaaaatatactcgacaactttaggatctctattgccaaatttttgaaaatatttatttatatgcttaaatctatataatgtagctccttcatcaatcatacatttaataacattgatgtatactgtatgataagatacatattctaacaatagatcttgtatagaaactgtatatcttttaagaattgtggatattaggatattattacgtaaactattacacaattctaaaatataaaacgtatcacggtcgaataatagttgatcaactatataattatcgattttgtgatttttcttcctaaactgtttacgtaaatagttagatagaatattcattagttcataaccactatagttactatcgaataacgcgtcaaatatttcccgtttaatatcgcatttgtcaagataataatagagtgtggtatgttcacgataagtataataacgcatctcttttttgtgtgaaattaaatagtttattacgtccaaagatgtagcataaccatcttgtgacctagtaataatataataatagagaactgttttacccattctatcatcataatcagtggtgtagtcgtaatcgtaattgtctaattcatcatcccaattataatattcaccagcacgtctaatctgttttattttgatcttgtatccatactgtatgttgctacatgtaggtattcctttatccaataatagtttaaacacatctacattgggatttgatgttgtagcgtatttttctacaatattaataccatttttgatactatttatttctatacctttcgaaattagtaatttcaataagtttatatcgatgttatcagaacatagatattcgaatatatcaaaatcattgatatttttatagtcgactgacgacaataacaaaatcacaacatcgtttttgatattattatttttcttggtaacgtatgcctttaatggagtttcaccatcatactcatataatggatttgcaccactttctatcaatgattgtgcactgctggcatcgatgttaaatgttttacaactatcatagagtatcttatcgttaaccatgattggttgttgatgctatcgcattttttggtttctttcatttcagttatgtatggatttagcacgtttgggaagcatgagctcatatgatttcagtactgtagtgtcagtactattagtttcgatcagatcaatgtttagatctatagaatcaaaacacgataggtcagaagataatgaatatctgtacgcttctttttgtactgtaacttctggttttgttagatggttgcatcgtgctttaacgtcaatggtacaaattttatcctcgctttgtgtatcatattcgtctctagtataaaattctatattcagattatcatgcgatgtgtatacgctaacggtatcaataaacggagcacaccatttagtcataacagtaatccaaaattttttaaagtatatcttaacgaaagaagttgtgtcattgtctacggtgtatggtactagatcctcataagtgtatatatctagagtaatgtttaatttattaaatggttgataatatggatcgtcgtggcaatttcctaagacgaaaataagacataaacacgcaataaatctaattgcggacatggttactccttaaaaaaatactaataatcaccttggctatttagtaagtgtcatttaacactatactcatattaatccatggactcataatctctatacgggattaacggatgttctatatacggggatgagtagttttcttctttaactttatactttttactaatcatatttagactgatgtatgggtaatagtgtttaaaaagttcgttctcatcatcagaataaatcaatatctctgtttttttgttatacagatgtattacagcctcatatattacgtaataaaacgtgtcatctaccttattaacttccaccgcatagttgtttgcaaatacggttaatcctttgacctcgtcaatttccgaccaatctgggcgtataataaatctgaactttaattgcttgtacccatttgaaataatttttaatcgacatccgtagttatcccctttatgtaactgtaaatttctcaacgcgatatctccattaataatgatgtcgaattcgtgttgtatacccatactgaattgatgaactaacgaatatcaacggcgttaatagtaatttactttttcatctttacatactgggtactagttttactatcataagtttataaattccacaagctactatggaataagccaaccatcttagtataccacacatgtcttaaagtttattaattaattacatgttgttttatatatatcgctacgaatttaaagagaaattagtttaggaagaaaaaaattatctatctacatcatcgtctattggataacgtctctgtattctacgatagagtgctactttaagatgcgacagatctgtgtcatcaaatatatactccattaaaatgattattacggcagcgaacttgatattggatacatcacgacctttgttaatatccacgacaatagacagcaatcccatggttccataaacagtgagtttatctttctttgaagcgatagtttgtagagatcttataaaaccgtcaaacgacatcgcatttatatctttagctaattcatatatgttaccatcgtaatatctacccgcgtctatcttaaacgtttccatcgctttaaagacgtttccaatagatggtctcatttcatcagtcatactgagccaacaaatgtaatcgtgtataatatctttgatagaatcagactctaaaaaaaaggaatcggctttattatacacattcatgataaacttaatgaaaaatgtttttcgttgtttaagttggatgaatagtatgtcttaataattgttattatttcattaattaatatttagtaacgagtacactctataaaaatgaaaatgacataactaatcataactagttatcaaagtgtctaggacgcgtaattttcatatggtatagatcctgtaagcattgtctgtattctggagctattttctttatcgcattagtaagttcagaatatgttataaatttaaatcgaataacgaacatgactttagtaaagtcgtctatattaactcttttattttctagccatcgtaataccatgtttaagatagtatattctctagttactacgatctcatcgttgtctagaatatcacaactgaatctacatccaattttagaaattggtctgtgttacatatttcttctatattattgttgatgtattgtcgtagaaaactattacgtagaccattttctttataaaacgaatatatagtactccaattatctttaccgatatatttgcacacataatccattctctcaattactacatctttaagattttcgttgttaagatatttggctaaactatataattctattagatcatcaacagaatcagtatatatttttctagatacaaagacgaactctttggcgtcctctataatattcccagaaaagatattttcgtgttttagtttatcgagatctaatctgttcatatacgtatctatgattgtacggtacgttatgataaccgcataaaataaaaatccatttttatttttagctactattcataattgagattgatgtaatactttgttactttgaacgtaaagacagtacacggatccgtatctccaacaagcacgtagtaatcaaatttggtgttgttaaacttcgcaatatttatcaatttagatagaaacttatactcatcatctgttttaggaatccatgtattattaccactttccaacttatcattatcccaggctatgtttcgtccatcatcattgcgtagagtaaataattcttctgtattcggtagttcaaatatataatccatgcatagatcggtaaagctattgtagatgtgatttttcctaaatctaatataaaactcgtttactagcaaacattttcctgatttatcgaccaagacacatatggtttctaaatctatcaagtggtggggatccatagttatgacgcagtaacatagattattaccttcttaactgtcgctaatatctatatatttattgttatcgtattggattctgcatatagaacacataaccaatttatagtcgcgctttacattctcaaatctacagttaagagatttagaaaacattatatcctcggatgatgttatcactgtttctggagtaggatatattaaagtctttacagatttcgtccgattcaaataaattactaaataatatcccacattatcatctgttagagtagtatcattaaatctattatattttatgaaaaatatatcacttgctcacctctatatttcgtacatttttaaactgtttatataatatctctctgatataatcagatatatttattgtgtcggtagatgataccgttacatttgaattaatggtgttccattttacaacttttaacaagttgaccaattcatttttaatagtatcaaacgctccatgattaaatattttaatagtatccattttatatcactacggacacaaagtagctgacataaaccattgtataatttttatgttttatgcttattagcgtacacattttggaagttccggctgccatgtatttcctggagagcaagtagatgatgaggaaccagataggttatatccgtacttgcacttaaagtttacattgtcgttgtatgagtatgatcttttaaacccgctagacaagtatccgtttgatattgtaggatgtggacatttaacaatttgacacgtgggtggatcggaccattctcctcctgaacacaggacaccagagttaccaatcaacgaatatccactattgcaactataagttacaacgcttccatcggtataaaaatcctcgtatccgttatgtcttccgttggatatagatggagggaattggcatttaacagattcacaaataggtgcctcgggattccataccatagatccagtaaatcctaattcacaatacgatttagattctcctatcaactgatatccgctattacaagagtacgttatactagagccaaagtctactccgccaatatcaagttggccattatcgatatctcgaggcgatgggcatctccgtttaatacattgattaaagagtgtccatccagtacctgtacatttagcatatataggtcccattttttgctttctgtatccaggtagacatagatattctatagtgtctcctatgttgtaattagcattagcattagttttcacactattcttaaatttcatattaatgggacgtgaaggaataggacagtatgatagaacgcatcctattcccaacaatgtcaggaacgtcacgctctccaccttcatatttatttatccgtaaaaatgttatcctggacatcgtacaaataataaaaaagcccatatatgtttgctattgtagaaattgtttttcacagttgctcaaaaacgatggcagtgacttatgagttacgttacactttggagtttcatctttagtaaacatatcataatattcgatattacgagttgacatatcgaacaaattccaagtatttgattttggataatattcgtattttgcatctgctataattaagatataatcaccgcaagaacacacgaacatctttcctacatggttaaagtacatgtataattctatccatttgtcttccttaactatatatttgtatagataattacgagtctcataagtaattccagtaattgcatagatgtcaccatcgtactctacagcataaactatactatgatgtctaggcatgggagacttttttatccaacgatttttagtgaaacattctacatcgtttaatactacatatttctcatacgtggtataaactccacccattacatatatatcatcgtttacgaataccgatgcgcctgaatatctaggagtaattaagtttggaagtcttatccattttgaagtgccgtgtttcaaatattctgctacacccgttgaaatagaaaattctaatcctcctattacatataactttccattgttaacacaagtactaacttctgattttaacgacgacatattagtaaccgttttccattttttcgtttcaagatctacccgcgatacggaataaacatgtctattgttaatcatgccgccaataatgtatagacaattatgtaaaacatttgcattatagaattgtctatctgtattaccgactatcgtccaatattctgttctaggagagtaatgggttattgtggatatataatcagagtttttaatgactactatattatgttttataccatttcgtgtcactggctttgtagatttggatatagttaatcccaacaatgatatagcattgcgcatagtattagttataaacttgggatgtaaaatgttgatgatatctacatcgtttggatttttatgtatccactttaataatatcatagctgtaacatcctcatgatttacgttaacgtcttcgtgggataagatagttgtcagttcatcctttgataattttccaaattctggatcggatgtcactgcagtaatattgttgattatttctgacatcgacgcattatatagttttttaattccatattgtttagaaaagttaaacatccttatacaatttgtggaattaatattatgaatcatagtttttacacatatatctactacaggcgtaacatcaattattacggcagcaactagtatcatttctacattgtttatggtgatgtttatcttcttccagcgtatatagtctaatagcgattcaaacgcgtgatagtttataccattcaatataatcacttcatcatttatatggtgctcctgaattcgtttaaaaaaattatacggagatgccgtaataatttccttattcacttgtataatttccccattgatagaaaacgtcacgctttccattcttgaagtactataagtaattatagtataatgtaaacgtttatatattcaatatttttataaaaatcattttgacattaattcctttttaaatttccgtctatcatctatagaaacgtattctatgaatttataaaatgcttttacgtgtcctatcgtaggcgatagaaccgctaaaaagcctattgaatttctacaaaagaatctattatatggtatagggagagtataaaacattaaatgcccgtacttattaaagtattcagtagccaatcctaactctttcgaatacttattaatggctcttgttctgtacgaatctatttttttgaacaacggacctagtggtatatcttgttctatgtatctaaaataatgtctgactagatccgttagtttaatatcctcagtcatcttgtctagaatggcaaatctaactgcgggtttaggctttagtttagtttttatatctacatctatgtctttatctaacaccaaaaatataatagctaatattttattacaatcatccggatattcttctacgatctcactaactaatgtttctttggttatactagtatagtcacgattagacaaataaagaaaatcagatgatcgatgaataatacatttaaattcatcatctgtaagatttttgagatgtctcattaaaatattattagggtcagtactcattatcattaggcagctattacttattttatttttcaccatatagatcaatcattagatcatcaaaatatgtttcaatcatcctaaagagtatggtgaatgactcttcccatctaatttctgaacgttcaccaatgtctctagccactttggcactaatagcgatcattcgcttagcgtcttctatattattaactggttgattcaatctatctagcaatggaccgtcggacagcgtcattctcatgttcttaatcaatgtacatacatcgccgtcatctaccaattcatccaacaacataagctttttaaaatcatcattataataggtttgatcgttgtcatttctccaaagaatatatctaataagtagagtcctcatgattagtaatttaactattttagttaacaactattttttatgttaaatcaattagtacaccgatatgtttaatacttattcatattttagtttttaggattgagaatcaatacaaaaaattaatgcatcattaattttagaaatacttagtttccacgtagttaatgaaacatttgaactcatcgtacaggacgttctcgtacaggacgtaactataaaccggtttatatttgttcaagatagatacaaatccgataactttttttacgaattctacgggatccactttaaaagtgtcataccgggttctttttatttttttaaacagatcaatggtgtgatgttgattaggtcttttacgaatttgatatagaatagcgtttacatatcctccataatggtcaatcgccatttgttcgtatgtcataaattctttaattatatgacactgtgtattatttagttcatccttgttcatcattaggaatctatccaatatggcaattatactagaactataggtgcgttgtatacacatattgatgtgtctgtttatacaatcaatgatatttggatccatgctactaccttcgggtaaaattgtagcatcatataccatttctagtactttaggttcattattatccattgcagaggacgtcatgatcgaatcataaaaaaatatattatttttatgttattttgttaaaaataatcatcgaatacttcgtaagatactccttcatgaacataatcagttacaaaacgtttatatgaagtaaagtatctacgatttttacaaaagttaggatgcataagtacaaagtacgcgataaacggaataataatatatttatctagtttatctttttttatcgcgttcatagttagatacatagtctcagaagtaggattatgtaacatcagcttcgataaaatgacggttatttagttttacacattcgctcatacatgtatgaccgttaactacagagtctacactaaaatgattgaacaatagatagtctaccattgtttcgtattcagatagtacagcgtagtacatagcatcttcacaaattatatcaatgtctaatagatatttgacgcattttatggatcccacttcaacagccatcttaaaatcggtaaaatcatattgctttcctttatcattaataatttctaaaacatcatctctatcataaaagatacaaatattaactgtttgatcagtaataacattgctagtcgatagcaatttgttaataagatgcgctgggctcaatgtcttaataagaagtgtaagaggactatctccgaatttgttttgtttattaacatctgttgatggaagtaaaagatctataatgtctacatacttgactgttttaaagcatacaatatggagaggtgtatttccatcatgatctggttttgagggactaattcctagtttcatcatccatgagattgtagaagcttttggattgtctgacataagatgtctatgaatatgatttttgccaaatttatccactatcctggcttcaaatccgatggacattatttttttaaacactctttctgaaggatctgtacacgccaacaacagaccacatccttcttcatcaacctagttgttaatcttggctccatactgtaccaataaatttattctctctatgacttcatcatctgttcccgagagataatatagaggcgttttatgctgtttatcacacgcgtttggatctgcgccgtgcgtcagcagcatcgcgactattctattattaattttagaagctatatgcaatggataatttccatcatccgtctcatttggagagtatcctctatgaagaagttcttcgacaaatcgttcatctagtcctttaattccacaatacgcatgtagaatgtgataattatttccagaaggttcgatagcttgtagcatattcctaaatacatctaaatttttactattatatttggaataaagagatagataatactcggccgacataatgttgtccattgtagtataaaaattaatatttctatttctatttctgtatatttgcaacaatttactctctataacaaatatcataacttagttcttttatgtcaagaaggcactggtttagttcatctataaatgtcacgccataactaccacgcatgctatactcagaattatgataaagatatttatccttggggtgtaggtaatggggattaatctttgttggatcagtctctaagttaacacatgtcacacatgatccatttatagttatatcacacgatgatgatttatgaattgattccggaagatcgctatcgtattttgtggttccacaattcatttccatacatgttattgtcacactaatattatgatgaactttatctagccgctgagtggtaaacaacagaacagatagtttattatctttaccaacaccctcagccgctgccacaaatctctgatccgtatccatgatggtcatgtttatttctagtccgtatccagtcaacactatgttagcatttctgtcgatatagctttcactcatatgacactcaccaataatagtagaattaatgtcataatttacaccaatagtgagttcggcggcaaagtaccaataccggtaatcttgtcgaggaggacatatagtattcttgtattctaccgaatacccgagagatgcgatacaaaagagcaagactaatttgtaaaccatcttactcaaaatatgtaacaatagtacgatgcaatgagtaagacaataggaaatctatcttatatacacataattattctatcaattttaccaattagttagtgtaatgttaacaaaaatgtgggagaatctaattagtttttctttacacaattgacgtacatgagtctgagttccttgtttttgctaattatttcatccaatttattattcttgacgatatcgagatcttttgtataggagtcagacttgtattcaacatgcttttctataatcatcttagttattttagcatcatccaatagtacattttccagattaacagagtagatattaatgtcgtatttgaacagagcctgtagcatctcaatgtctttattatctatagccaatttaatgtcgggaatgaagagaagggaattgttagtgttggtaaatgccatatagtcgagcaagagaatcatcatatccacgtgtccattttttatagtgatgtgaatacaactaaggagaatagccagatcaaaagtagatggtatctctgaaagaaagtaggaaacaatacttacatcattaagcatgacggcatgataaaatgaagttttccatccagttttcccatagaacatcagtctccaatttttcttaacaaacagtttcaccgtttgcatgttaccactatcaaccgcataatacaatgcggtgtttcctttgtcatcaaattgtgaatcatccattccactgaatagcaaaatctttactattttggtatcttctaatgtggctgcctgatgtaatggaaattcattctctagaagatttttcaatgctccagcgttcaacaacgtacatactagacgcacgttattatcagctattgcataatacaaggcactatgaccgttgatatccgccttaaatgcatctttgctagagagaaagcttttcagctgcttagacttccaagtattaattcgtgacagatccatgtctgaaacgagacgctaattagtgtatattttttcattttttataattttgtcatattgcaccagaattaataatatctctaatagatctgattagtagatacatggctatcgcaaaacaacatatacacatttaataaaaataatatttattaagaaaattcagatttcacgtacccatcaatataaataaaataatgattccttacaccgtacccatataaacaatattaaggagattccaccttacccataaacaatataaatccagtaatatcatgtctgatgatgaacacaaatggtgtattaaattccagttcttcaggagatgatctcgccgtagctaccatgatagtagatgcctctgctacagttccttgttcgtcaacatctatctttgcattctgaaacattttataaatatataatgggtccctagtcatatgtttaaacgacgcattatctggattaaacatactaggagccatcatttcggctatcgacttaatatccctcttattttcgatagaaaatttagggagtttaagattgtacactttattccctaattgaaacgaccaatagtctaattttgcagccgtaatagaatctgtgaaatgggtcatattatcacctattgccaggtacatactaatattagcatccttatacggaaggcgtaccatgtcatattctttgtcatcgattgtgattgtatttccttgcaatttagtaactacgttcatcatgggaaccgttttcgtaccgtacttattagtaaaactagcattgcgtgttttagtgatatcaaacggatattgccatatacctttaaaatatatagtattaatgattgcccatagagtattattgtcgagcatattagaatctactacattaaacataccggatctacgttctactatagaattaattttattaaccgcatctcgtctaaagtttaatctatataggccgaatctatgatattgttgataatacaacggtttaatgcacacagtattatctacgaaactttgataagttagatcagtgtacgtatatttagatgttttcagcttagctaatcctgatattaattctgtaaatgctggacccagatctctttttctcaaatccatagtcttcaataattctattctagtattacctgatgcaggcaatagcgacataaacatagaaaacgaataaccaaacggtgagaagacaatattatcatcttcattcccatcttgaatatttttatacgctactataccggcattggtaaatccttgcagacgataggtagacactgaacacgttaacgatagtatcaataacgcaatcatgattttatggtattaataattaaccttatttttatgttcggtataaaaattattgatgtctacacatccttttgtaattgacatctatatatccttttgtataatcaactctaatcactttaacttttacagttttccctaccagtttatccctatatttaacatatctatccatatgcatcttaacactctctgccaagatagcttcaaagtgaggatagtcaaaaagataaatatatagagcataatcattctcgtatactctgccctttattacatcacccgcattgggcaacgaataacaaaatgcaagcatcttgttaacgggctcgtaaattgggataaaaattatgtttttattgattttatatctattttattcaagagaatattcaggaatttctttttccggttgtatctcatcgcagtatatatcatttgtacattgtttcatattttttaatagtttacaccttttagtaggactagtatcgtacaattcatagctgtattttgaattccaatcacgcataaaaatatcttccaattgttgacgaagacctaatccatcatccggtgtaatattaatagatgctccacatgtatccgtaaagtaatttcctgtccaatttgaggtacctatataggccgttttatcggttaccatatatttggcatggtttaccctagaatacggaatgggaggatcagcatctggtacaataaatagctttacttctatatttatgtttttagattttagcatagcgatagatcttaaaaagtttctcatgataaacgaagatcgttgccagcaactaatcaatagcttaacggatacttgtctgtctatagcggatcttcttaattcatcttctatataaggccaaaacaaaattttacccgccttcgaataaataatagggataaagttcataacagatacataaacgaatttactcgcatttctaatacatgacaataaagcggttaaatcattggttctttccatagtacatagttgttgcggtgcagaagcaataaatacagagtgtggaacaccacttacggtaatactaagaggatgatctgtattataatacgacggataaaagtttttccaattatatggtagattgttaactccaagataccagtatacctcaaaaatttgagtgagatccgctgccaagttcctattattgaagatcgcaatacccaattccttgacctgagttagtgatctccaatccatgttagcgcttcctaaataaatatgtgtattatcagatatccaaaattttgtatgaagaactcctcctaggatatttgtaatatctatgtatcgtacttcaactccggccatttgtagtctttcaacatcctttaatggtttgttagatttattgacggctactctaactcgtactcctcttttgggtaattgtacaatcttgtttaatattatcgtgccgaaattcgtacccacttcatccgataaactccaataaaaagatgatatatctagtgtttttgtggtattggatagaatttccctccacatgttaaatgtagacaaatatactttatcaaattgcatacctataggaatagtctctgtaatcactgcgattgtattatccggattcattttatttgttaaaagaataatcctatatcacttcactctattaaaaatccaagtttctatttctttcatgactgattttttaacttcatccgtttccttatgaagatgatgtttggcaccttcataaatttttatttctctattacaatttgcatgttgcatgaaataatatgcacctaaaacatcgctaatcttattgtttgttccctggagtatgagagtcggggggggggggtgttaatcttggaaattatttttctaaccttgttggtagcctttaagacctgactagcaaatccagccttaattttttcatgattgattaatgggtcgtattggtatttataaactttatccatatctctagatactgattctggacatagctttccgactggcgcatttggtgtgatggttcccataagtttggcagctagcagattcagttttgaaacagcatctgcattaactagaggagacattagaatcattgctgtaaacaagtttggattatcgtaagaggctagtatagaaactgttgctcccatggaatgacccaataagaagactggaactcctaaataagtagatttaatagttaccacgtgctgtaccacatctctaacatacgtaccaaagtcatcaatcatcattttttcaccattacttcttccatgtccaatatgatcatgtgagaatactaaaattcctaacgatgatatgttttcagctagttcgtcataacgtccagaatgtttaccagctccatgacttatgaatactaatgccttaggatatgtaataggtttccaatatttacaatatatgtaatcattgtccagattgaacatacagtttgcactcatgattcacgttatataactatcaatattaacagttcgtttgatgatcatattatttttatgttttattgataattgtaaaaacatacaattaaattaatatagaggaaggagacggctactgtcttttgtgagatagtcatggcgactaaattagattatgaggatgctgttttttactttgtggatgatgataaaatatgtagtcgcgactccatcatcgatctaatagatgaatatattacgtggagaaatcatgttatagtgtttaacaaagatattaccagttgtggaagactgtacaaggaattgatgaagttcgatgatgtcgctatacggtactatggtattgataaaattaatgagattgtcgaagctatgagcgaaggagaccactacatcaattttacaaaagtccatgatcaggaaagtttattcgctaccataggaatatgtgctaaaatcactgaacattggggatacaaaaagatttcagaatctagattccaatcattgggaaacattacagatctgatgaccgacgataatataaacatcttgatactttttctagaaaaaaaattgaattgatgatataggggtcttcataacgcataattattacgttagcattctatatccgtgttaaaaaaaattatcctatcatgtatttgagagttttatatgtagcaaacatgatagctgtgatgccaataagctttagatattcacgcgtgctagtgttagggatggtattatctggtggtgaaatgtccgttatataatctacaaaacaatcatcgcatatagtatgcgatagtagagtaaacatttttatagtttctactggattcatacatcgtctacccaattcggttataaatgaaattgtcgccaatcttacacccaaccccttgttatccattagtatagtattaacttcgttatttatgtcataaactgtaaatgattttgtagatgccatatcatacatgatattcatgtccctattataatcattactaactttatcacaatatatgttgataatatctatatatgatctagtctttgtgggcaactgtctatacaagtcgtctaaacgttgtttactcatatagtatcgaacagccatcattacatggtcccgttccgttgatagataatcgagtatgttagtagacttgtcaaatctatataccatattttctggaagtggatatacatagtcgtgatcaacattattgctagcctcatcttctatatcatgtactataccattatctatatcctctatatcctgtactataccattatctatatcctctatatcctctatatcctgtactataccattatctatatcctctatatcatctacataatctacgatattattacacataaacatcgacaacatactattgtttattatctaagtcctgttgatccaaacccttgatctcctctatctgtactatctagagattgtacttctttcagttctggataatatatacgttgatagattagctgagctattctatctccagtatttacattaaacgtacattttccattattaataagaatgactcctatgtttcccctataatcttcgtctattacaccacctcctatatcaatgccttttagtgacagaccagacctaggagctattctaccatagcaaatcttaggcatggacatactaatatctgtcttaattaactgtctttctcctggagggatagtataatcgtaagcgctatacaaatcatatccggcagcacccggcgattgcctagtaggagatttagctctgttagtttccttaacaaatctaactggtgagttaatattcatgttgaacataaaactaatattttatttcaaaattatttaccatcccatatattccatgaataagtgtgatgattgtacacttctatagtatctatatacgattcacgataaaatcctcctatcaatagcagtttattatccactatgatcaattctggattatccctcggataaataggatcatctatcagagtccatgtattgctggattcacaataaaattccgcatttctaccaaccaagaataaccttctaccgaacactaacgcgcatgatttataatgaggataataagtggatggtccaaactgccactgatcatgattgggtagcaaatattctgtagttgtatcagtttcagaatgtcctcccattacgtatataacattgtttatagatgccactgctggattacatctaggtttcagaagactcggcatattaacccaagcagcatccccgtggaaccaacgctcaacagatgtgggatttggtagacctcctactacgtataatttattgttagcgggtatcccgctagcatacagtctggggctattcatcggaggaattggaatccaattgtttgatatataatttacagctatagcattgttatgtatttcattgttcatccatccaccgatgagatatactacttctccaacatgagtacttgtacacatatggaatatatctataatttgatccatgttcataggatactctatgaatggatacttgtatgatttgcgtggttgtttatcacaatgaaatattttggtacagtctagtatccattttacattatttatacctctgggagaaagataatttgacctgattacatttttgataaggagtagcagatttcctaatctatttcttcgctttatataccacttaatgacaaaatcaactacataatcctcatctggaacatttagttcatcgctttctagaataagtttcatagatagataatcaaaattgtctatgatgtcatcttccagttccaaaaagtgtttggcaataaagtttttagtatgacataagagattggatagtccgtattctatacccatcatgtaacactcgacacaatattcctttctaaaatctcgtaagataaagtttatacaagtgtagatgataaattctacagaggttaatatagaagcacgtaataaattgacgacgttatgactatctatatatacctttccagtatacgagtaaataactatagaagttaaactgtgaatgtcaaggtctagacaaaccctcgtaactggatctttatttttcgtgtatttttgacgtaaatgtgtgcgaaagtaaggagataactttttcaatatcgtagaattgactattatattgccacctatagcatcaataattgttttgaatttcttagtcatagacaatgctaatatattcttacagtacacagtattaacaaatatcggcatttatgtttctttaaaagtcaacatctagagaaaaatgattatcttcttgagacataactcccattttttggtattcacccacacgtttttcgaaaaaattagtttttccttccaatgatatattttccatgaaatcaaacggattggtaacattataaatttttttaaatcccaattcagaaatcaatctatccgcgacaaattctatatatgttttcatcatttcacaattcattcctataagtttaactggaagagccgcagtaagaaattcttgttcaatggatactgcatctgttataatagatctaacggtttcttcactcggtggatacaataaatgtttaaacatcaaacatgcgaagtcgcagtgtagaccctcgtctctactaattagttcgttggaaaacgtgagtccgggcattaggccacgctttttaagccaaaatatggaagcgaatgatccagaaaagaaaattccttctactgcagcaaaggcaataagtctctctccataaccggcgctgtcatgtatccacttttgagcccaatcggccttcttttttacacaaggcatcgtttctatggcattaaagagatagtttttttcattactatctttaacataagtatcgatcaaaagactatacatttccgaatgaatgttttcaatggccatctgaaatccgtagaaacatctagcctcggtaatctgtacttctgtacaaaatcgttccgccaaattttcattcactattccgtcactggctgcaaaaaacgccaatacatgttttataaaatatttttcgtctggtgttagtttattccaatcattgatatctttagatatatctacttcttccactgtccaaaatgatgcctctgcctttttatacatgttccagatgtcatgatattggattgggaaaataacaaatctatttggatttggtgcaaggatgggttccataactaaattaacaatatcaataaattttttttcagttatctatatgcctgtacttggattttttgtacatcgatatcgccgcaatcactacaataattacaagtattattgatagcattgttattagtactatcataattaaattatcgacattcatgggtgctgaataatcgttattatcatcattatcattttgtaattgtgacatcatactaaataaatcgtttgcgagattgttgtgggaagcgggcatggaggatgcattatcattattatttaacgccttccatttggattcacaaatgttacgcacattcaacattttatggaaactataattttgtgaaaacagataacaagaaaactcgttatcgttcaaatttttaacgatagtaaaccgattaaacgtcgagctaatttctaacgctagcgactctgttggatatgggtttccagatatatatcttttcagttcccctacgtatctataatcatctgtaggaaatggaagatatttccatttatctactgttcctaatatcatatgtggtggtgtagtaaaaccattaagcgcgaaagatgttattttgcatcgtattttaacttcgcaataatttctggttagataacgcactctaccagtcaagtcaatgatattagcctttacagatatattcatagtagtcgtaacgatgactccatcttttagatgcgatactcctttgtatgtaccagaatcttcgtaccgcaaactcgatatatttaaacaagttaatgagatattaacgcgttttatgaatgatgatatataaccagaagttttatcctcggtggctagcgctataaccttatcattataataccaactagtgtaattaatatgtgacacgttagtgtgggtacaaatatgtacattatcgtctacgtcgtattcgatacatccgcatacagccaacaaatataaaatgacaaatactctaacgccgttcgtacccatcttgatgcggtttaataaatgttttgatttcaatttattgtaaaaaaagattcggttttatactgttcgatattctcattgcttatattttcatctatcatctccacacagtcaaatccgtggttagcatgcacctcatcaaccggtaaaagactatcggactcttctatcattataactctagaatatttaatttggtcattattaatcaagtcaattatcttatttttaacaaacgtgagtattttactcattttttataaaaacttttagaaatatacagactctatcgtgtgtctatatcttctttttatatccaatgtatttatgtctgatttttcttcatttatcatatataatggtccaaattctacacgtgcttcggattcatccagatcattaaggttcttataattgtaacatccttctcttccctcttctacatcttccttcttatttttattcttattcttattcttagcgtcacagaatctaccacagcaggatcccatgacgagcgtcatattaaactaattcattttcaattataatatatgattagtaatgaccattaaaataaaaaatattcttcataaccggcaagaaagtgaaaagttcacattgaaactatgtcagtagtatacatcatgaaatgagatgaaatgatgatatatatatatatatactctattttggtggaggattatatgatataattcgtggataatcattcttaagacacatttctttattcgtaaatcttttcacgttaaatgagtgtccatattttgcaatttcttcatatgatggcggtgtacgtggacgaagctgctcctgttcttgttgtagtcgccgactgtcgtgtctgcgtttagatccctccattatcgcgattgcgtagatggagtactattttataccttgtaattaaatttttttattaattaaacgtataaaaacgttccgtatctgtatttaagagccagatttcgtctaatagaacaaatagctacagtaaaaataactagaataattgctacacccactagaaaccacggatcgtaatacggcaatcggttttcgataataggtggaacgtatattttatttaaggacttaacaattgtctgtaaaccacaatttgcttccgcggatcctgtattaactatctgtaaaagcatatgttgaccgggcggagccgaacattttccgatatccaatttctgtatatctataatattattaacctccgcatacgcattacagttcttttctagcttggataccgcactaggtacatcgtctagatctattcctatttcctcagcgatagctcttctatccttttccggaagcaatgaaatcacttcaataaatgattcaaccatgagtgtgaaactaagtcgagaattactcatgcatttgttagttattcggagcgcgcaatttttaaactgtcctataacctctcctatatgaatagcacaagtgacattagtagggatagaatgttgagctaatttttgtaaataactatctataaaaagattatacaaagttttaaactctttagtttccgccatttatccagtctgagaaaatgtctctcataataaatttttccaagaaactaattgggtgaagaatggaaacctttaatctatatttatcacagtctgtcttggtacacatgatgaattcttctaatgctgtactaaattcgatatctttttcgatttctggatatgtttttaataaagtatgaacaaagaaatgaaaatcgtaataccagttatgtttaactttgaaattgttttttattttcttgttaatgattccagccacttgggaaaagtcaaagtcgtttaatgccgatttaatacgttcattaaaaacaaactttttatcctttagatgaattattattggttcattggaatcaaaaagtaagatattatcgggtttaagatctgcgtgtaaaaagttgtcgcagcatggtagttcgtaaattttaatgtataacagagccatctgtaaaaagataaactttatgtattgtaccaaagatttaaatcctaatttgatagctaactcggtatctactttatctgcagaatacagtgctaggggaaaaattataatatttcctctttcgtattcgtagttagttctcttttcatgttcgaaaaagtgaaacatgcggttaaaatagtttataacattaatattactgttaataactgccggataaaagtgggatagtaatttcacaaatttgatactgtcctttctctcgttaaacgcctttaaaaaaactttagaagaatatctcaatgagagttcctgaccatccatagtttgtatcaataatagcaacatatgaagaacccgtttatacagagtatgtaaaaatgttaatttatagtttaatcccatggcccacgcacacacgattaattttttttcatctccctttagattgttgtatagaaatttgggtactgtgaactccgccgtagtttccatgggactatataattttgtggcctcgaatacaaattttactacatagttatctatcttaaagactataccatatcctcctgtagatatgtgataaaaatcgtcgtttataggataaaatcgtttatccttttgttggaaaaaggatgaattaatgtaatcattctcttctatctttagtagtgtttccttattaaaattcttaaaataatttaacaatctaactgacggagcccaattttggtgtaaatctaattgggacattatgttgttaaaatataaacagtctcctaatataacagtatctgataatctatggggagacatccattgatattcaggggatgaatcattggcaacacccatttattgtacaaaaagccccaatttacaaacgaaagtccaggtttgatagagacaaactattaactattttgtctctgtttttaacacctccacagtttttaatttctttagtaatgaaattattcacaatatcagtatcttctttatctaccagagattttactaacttgataaccttggctgtctcattcaatagggtagtgatatttgtatgtgtgatattgatatctttttgaattgtttcttttagaagtgattctttgatggtgtcagcatacgaattacaataatgcagaaactcagttaacatgcaggaattatagtaagccaattccaattgttgcctgtattgtattagagtattaatatgcgcaatggtgtccttgcgtttctctgatagaatgcgagcagcgattttggcgttatcatttgacgatatttctggaatgacgaatcctgtttctactaactttttggtaggacaaagtgaaacaatcaagaagatagcttctcctcctatttgtggaagaaattgaactcctctagatgatctactgacgatagtatctccttgacagatattggaccgaattacagaagtacctggaatgtaaagccctgaaaccccctcattttttaagcagattgttgccgtaaatcctgcactatgcccaagatagagagctcctttggtgaatccatctctatgtttcagtttaaccaagaaacagtcagctggtctaaaatttccatctctatctaatacagcatctaacttgatgtcaggaactatgaccggtttaatgttatatgtaacattgagtaaatccttaagttcataatcatcactgtcatcagttatgtacgatccaaacaatgtttctactggcatagtggatacgaagatgctatccatcagaatgtttccctgattagtattttctatatagctattcttctttaaacgattttccaaatcagtaactatgttcatttttttaggagtaggacgcctagccagtatggaagaggattttctagatcctctcttcaacatctttgatctcaatggaatgcaaaaccccatagtgaaacaaccaacgatgtaacaaccaacgataaaaataatattgtttttcactttttataattttaccatctgactcatggattcattaatatctttataagagctactaacgtataattctttataactgaactgagatatatacaccggatctatggtttccataattgagtaaatgaatgctcggcaataactaatggcaaatgtatagaacaacgaaattatactagagttgttaaagttaatattttctatgagctgttccaataaattatttgttgtaactgcgttcaagtcataaatcatcttgatactatccagtaaaccgtttttaagttctggaatattatcatcccattgtaaagcccctaattcgactatcgaatatcctgctctgatagcagtttcaatatcgacggacgtcaatactgtaataaaggtggtagtattgtcatcatcgtgataaactactggaatatggtcgttagtaggtacggtaactttacacaacgcgatatataactttccttttgtaccatttttaacgtagttgggacgtcctgcagggtattgttttgaagaaatgatatcgagaacagatttgatacgatatttgttggattcctgattatttactataatataatctagacagatagatgattcgataaatagaaaaggtatatcgttggtaggataatacatccccattccagtattctcggatactctattaatgacactagttaagaacatgtcttctattctagaaaacgaaaacatcctacatggactcattaaaacttctaacgctcctgattgtgtctcgaatgcctcgtacaaggatttcaaggatgccatagattctttgaccaacgatttagaattgcgtttagcatctgatttttttattaaatcgaatggtcggctctctggtttgctaccccaatgataacaatagtcttgtaaagataaaccgcaagaaaatttatacgcatccatccaaataaccctagcaccatcggatgatattaatgtattattatagattttccatccacaattattgggccagtatactgttagcaacggtatatcgaatagattactcatgtaacctactagaatgatagttcgtgtactagtcataatatctttaatccaatctaagaaatttaaaattagattttttacactgttaaagttaacaaaggtattacccggatacgtggatatcatatatggcattggtccattatcagtaatagctccataaactgatacggcgatggtttttatatgtgtttgatctaacgaggaagaaattcgcgcccacaattcatctctagatatgtatttaatatcaaacggtaacacatcaatttcgggacgcgtatatgtttctaaatttttaatccaaatataatgatgacctatatgccctattatcatactgtcaactatagtacacctagagaacttacgatacatctgtttcctataatcgttaaattttacaaatctataacatgctaaaccttttgacgacaaccattcattaatttctgatatggaatctgtattctcgataccgtattgttctaaagccagtgctatatctccctgttcgtgggaacgctttcgtataatatcgatcaacggataatctgaagtttttggagaataatatgactcatgatctatttcgtccataaacaatctagacataggaattggaggcgatgatcttaattttgtgcaatgagtcgtcaatcctataacttctaatcttgtaatattcatcatcgacataatactatctatgttatcatcgtatattagtataccatgaccttcttcatttcgtgccaaaatgatatacagtcttaaatagttacgcaatatctcaatagtttcataattgttagctgttttcatcaagatttgtaccctgtttaacatgatggcgttctatacgtttctattttctattttttaaatttttaacgatttactgtggctagatacccaatctctctcaaatatttttttagcctcgcttacaagctgtttatctatactattaaaactgacgaatccgtgattttggtaatgggttccgtcgaaatttgccgaagtgatatgaacatattcgtcgtcgactatcaacaattttgtattattctgaatagtgaaaaccttcacagatagatcattttgaacacacaacgcatctagacttttggcggttgccatagaatatacgtcgttcttatcccaattaccaactagaagtctgatcttaactcctctattaatggctgcttctataatggagttgtaaatgtcgggccaatagtagctattaccgtcgacacgtgtagtgggaactatggccaaatgttcaatatctatactagtcttagctgacctgagtttatcaataactacatcggtatctagatctctagaatatcccaataggtgttccggagaatcagtaaagaacactccacctataggattcttaatatgatacgcagtgctaactggcaaacaacaagccgcagagcataaattcaaccatgaattttttgcgctattaaaggctttaaaagtatcaaatcttctacgaagatctgttgccagcgggggataatcagaatatacacctaacgttttaatcgtatgtatagatcctccagtaaatgacgcgtttcctacataacatctttcatcatctgacacccaaaaacaaccgagtagtagtcccacattattttttttatctatattaacggttataaaatttatatccgggcagtgactttgtagctctcccagatttcttttccctcgttcatctagcaaaactattattttaatccctttttcagatgcctcttttagtttatcaaaaataagcgctcccctagtcgtactcagaggattacaacaaaaagatgctatgtatatatatttcttagctagagtgataatttcgttaaaacattcaaatgttgttaaatgatcggatctaaaatccatattttctggtagtgtttctaccagcctacattttgctcccgcaggtaccgatgcaaatggccacatttagttaacataaaaacttatacatcctgttctatcaacgattctagaatatcatcggctatatcgctaaaattttcatcaaagtcgacatcacaacctaactcagtcaatatattaagaagttccatgatgtcatcttcgtttatttctatatccgtatccattgtagattgttgaccgattatcgagtttaaatcattactaatactcaatccttcagaatacaatctgtatttcattgtaaatttataggcggtgtatttaagttggtagattttcaattatgtattaatatagcaacagtagtttttgctcctccttgattctagcatcctcttcattattttcttctacgtacataagcatgtccaatacgttagacaacacaccaacgatggcggccgccacagacacgaatatgactaaaccgatgaccatttaaaaacccctctctagctttcacttaaactgtatcgattattcttttagaacatgtataatataaaaacattattctatttcgaatttaggcttccaaaaatttttcatccgtaaaccgataataatatatatagacttgttaatagtcggaataaatagattaatgcttaaactatcatcatctccacgattagagatacaatatttacattttttttgctgtttcgaaactttatcaatacacgttaatacaaacccaggaaggagatattgaaactgaggctgttgaaaatgaaacggtgaatacaataattcagataatgtaaaatcatgattccgtattctgatgatattagaactgctaatggatgtcgatggtatgtatctaggagtatctattttaacaaagcatcgatttgctaatatacaattatccttttgattaattgttattttattcatattcttaaaaggtttcatatttatcaattcttctacattaaaaatttccatttttaatttatgtagccccgcaatactcctcattacgtttcattttttgtctataatatccattttgttcatctcggtacatagattatccaattgagaagcgcatttagtagttttgtacattttaagtttattgacaaatcgtcgaaaactagttatagttaacattttattatttgataccctgatattaatacccctgccgttactattatttataactgatgtaatccacgtaacattggaattaactatcgatagtaatgcatcgacgcttccaaaattgtctattataaactcaccgataatttttttattacatgttttcatattcattaggattatcaaatctttaatcttactacgattgtatgcgttgatattgcaagacgtcattctaaaagacggaggatctccatcaaatgccaaacaatcacgtacaaagtacatggaaataggttttgttctattgcgcatcatagatttatatagaacacccgtagaaatactaatttgttttactctataaaatactaatgcatctatttcatcgttttgtataacgtctttccaagtgtcaaattccaaatttttttcattgatagtaccaaattcttctatctctttaactacttgcatagataggtaattacagtgatgcctacatgccgttttttgaaactgaatagatgcgtctagaagcgatgctacgctagttacaatcaccactttcatatttagaatatatatatgtaaaaatatagtagaatttcattttgtttttttctatgctataaatgaattctcattttgcatctgctcatactccgttttatattaataccaaagaaggaaaatatttggttctaaaagccgttaaagtatgcgatgttagaactgtagaatgtgaaggaagtaaagcttcctgcgtactcaaagtagataaaccctcatcacccgcgtgtgagagaagaccttcgtccccttccagatgcgagagaatgaataacccaggaaaacaagttccgtttatgaggacggacatgctacaaaatatgttcgcggctaatcgcgataatgtagcttctagacttttgtcctaaaatactattatatccttttcgatattaataaatccgtgtcgtccaggttttttatctctttcagtatgtgaatagataggtattttatctctattcatcatcgaatttaagagatccgataaacattgtttgtattctccagatgtcagcatctgatacaacaatatatgtgcacataaacctctggcacttatttcatgtaccttccccttatcactaaggagaatagtatttgagaaatatgtatacatgatattatcatgaattagatatacagaatttgtaacactctcgaaatcacacgatgtgtcggcgttaagatctaatatatcactcgataacacattttcatctagatacactagacattttttaaagctaaaatagtctttagtagtgacagtaactatgcgattattttcatcgatgatacatttcatcggcatattattacgcttaccatcaaagactataccatgtgtatatctaacgtattctagcatggttgccatacgcgcattaaacttttcaggatctttggatagatcttccaatctatctatttgagaaaacatttttatcatgttcaatagttgaaacgtcggatccactatatagatattatctataaagattttaggaactacgttcatggtatcctggcgaatattaaaactatcaatgatatgattatcgttttcatcttttatcaccatatagtttctaagatatgggattttacttaatataatattatttcccgtgataaattttattagaaaggccaaatctataagaaaagtcctagaattagtctgaagaatatctatatcgccgtatagtatatttggattaattagatatagagaatatgatccgtaacatatacaacttttattatggcgtctaagatattcttccatcaacttattaacatttttgactagggaagatacattatgacgtcccattacttttgccttgtctattattgcgacgttcatagaatttagcatatctcttgccaattcttccattgatgttacattataagaaattttagatgaaattacatttggagctttaatagtaagaactcctaatatgtccgtgtatgtggtcactaatacagattgtagttctataatcgtaaataatttacctatattatatgtttgagtctgtttagaaaagtagctaagtatacgatcttttatttctgatgcagatgtattaacatcggaaaaaaatctttttttattcttttttactaaagatacaaatatgtctttgttaaaaacagttattttttgaatatttctagcttgtaattttaacatatgatattcgttcacactaggtactctgcttaaataggtttctataatctttaatgtaatattaggaaaagtattctgatcaggattcctattcattttgaggatttaaaactctgattattgtctaatatggtctctacgcaaactttttcacagagcgatagagtttttgataactcgtttttcttaagaaatataaaactactgtctccagagctcgctctatcttttattttatttaattcgatacaaactcctgatactggttcagaaagtaattcattaattttcagtcctttatagaagatatttaatatagataatacaaaatcttcagtttttgatatcgatctgattgatcctagaactagatatattaataacgtgctcattaggcagtttatggcagcttgataattagatatagtatattccagttcatatttattagataccgcattgcccagattttgatattctatgaattcctctgaaaataaatccaaaataactagacattctattttttgtggattagtgtactctcttccctctatcatgttcactactggtgtccacgatgataaatatctagagggaatataatatagtccataggatgccaatctagcaatgtcgaataactgtaattttattcttcgctcttcattatgaattgattcttgaggtataaacctaacacaaattatattattagacttttcgtatgtaatgtctttcatgttataagtttttaatcctggaatagaatctattttaatgaggcttttaaacgcagagttctccaacgagtcaaaacataatactctgttggttttcttatatacaatattacgattttcttctttgaatggaataggtttttgaattagtttataattacaacataatagataaggaagtgtgcaaatagtacgcggaaaaaacataatagctcccctgtttttatccatggttttaagtaaatgatcactggcttctttagttaatggatattcgaacattaaccgtttcatcatcattggacagaatccatattttttaatgtaaagagtgatcaaatcattgtgtttattgtaccatcttgttgtaaatgtgtattcggttatcggatctgctcctttttctattaaagtatcgatatcgatctcgtctaagaattcaactatatcgacatatttcatttgtatacacataaccattactaacgtagaatgtataggaagagatgtaacgggaacagggtttgttgattcgcaaactattctaatacataattcttctgttaatacgtcttgcacgtaatctattatagatgccaagatatctatataattattttgtaagatgatgttaactatgtgatctatataagtagtgtaataattcatgtattttgatatatgttccaactctgtctttgtgatgtctagtttcgtaatatctatagcatcctcaaaaaatatattcgcatatattcccaagtcttcagttttatcttctaaaaaatcttcaacgtatggaatataataatctattttacctcttctgatatcattaatgatataatttttgacactatcttctgtcaattgattcttattcactatatctaagaaacggatagcgtccctaggacgaactacttccattaatatctctattatagcttctggacataattcatctattataccagaattaatgggaactattccgtatctatctaacatagttttaagaaagtcagaatctaagacttgatgttcatatattggttcatacatgaaatgatttctattgatgatagtgactatttcgttctctgaaaattggtaactcattttatatatgctttccttgttgatgaaggataggatatactcaatagaatttgtaccaacaaactgttctcttatgaatcgtatatcatcatctgaaataatcatgtaaggcatacatttaacaattagagacttgtctcctgttatcaatatactattcttgtgataatttatgtgtgaggcaaatttgtccacgttctttaattttgttatagtagatatcaaatccaatggagctacagttcttggcttaaacagatatagtttttctggaacaaattctacaacattattataaaggactttgggtagataagtgggatgaaatcctattttaattaatgctatcgcattgtcctcgtgcaaatatccaaacgcttttgtgatagtatgacattcattatctagaaacgctctacgaatatctgtcacagatatcatctttagagaatactagttgcgttaatagtactaaaatttgtattttttttaatatatctcaaaaaaaattaatatttatggatccgatgtataattagaatcagaatctaatgatgacgtacccaagaagtttatctacagccaatttagctgcattatttttagcatctcgtttagattttccatcggccttatcgaatactcttccgtcgatatctacacaggcataaaatgtaggagagttactaggcccaactgattcaatacgaaaagaccaatctctcttagttatttggcagtactcattaataatggtgacagggttagcatctttccaatcaataatttttttagccggaataacatcatcaaaagacttatgatcctctctcattgatttttcgcgggatacatcatctattatgacgtcagccatagcatcagcatccggcttatccgcctccgttgtcataaaccaacgaggaggaatatcgtcggagctgtacaccatagcactacgttgaagatcgtacagagctttattaacttctcgcttctccatattaagttgtctagttagttgtgcagcagtagctccttcgattccaatggttttaatagcctcacacacaatctctgcgttagaacgttcgttgatatagattttagacattttagagagaactaacgcaatcagtaataaaactaatttattttatcattttttttattcatcatcctctggtggttcgtcgtttctatcgaatgtagctctgattaacccgtcatctataggtgatgctggttctggagattctggaggagatggattattatctggaagaatctctgttatttccttgttttcatgtatcgattgcgttgtaacattaagattgcgaaatgctctaaatttgggaggcttaaagtgttgtttgcaatctctacacgcgtgtctaactagtggaggttcgtcagctgctctagtttgaatcatcatcggtgtagtattcctacttttacagttaggacacggtgtattgtatttctcgtcaagaacgttaaaataatcgttgtaacttacatcctttattttatctatattgtattctactcctttcttaatgcattttataccgaataagagatagcgaaggaattctttttcggtgccgctagtacccttaatcatatcacatagtgttttatattccaaatttgtggcaatagacggtttatttctatacgatagtttgtttttggaatcctttgagtattctataccaatattattctttgattcgaatttagtttcttcgatattagattttgtattacctatattcttgatgtagtactttgatgatttttccatggcccattctattaagtcttccaagttggcatcatccacatattgtgatagtaattctcggatatcagtagcggttaccgccattgatgtttgttcattggatgagtaactactaatgtatacattttccatttataacacttatgtattaactttgttcatttatattttttcattattatgttgatattaacaaaagtgaatatatatgttaataattgtattgtggttatacggctacaattttataatgagtgaaagtcagtgtccgatgatcaatgacgatagctttactctgaaaagaaagtatcaaatcgatagtgcggagtcaacaataaaaatggataagaagaggataaagtttcagaatagagccaaaatggtaaaagaaataaatcagacaataagagcagcacaaactcattacgagacattgaaactaggatacataaaatttaagagaatgattatgactactactctagaagatatagcaccatctattccaaataatcagaaaacttataaactattctcggacatttcagccatcggcaaagcatcacggaatccaagtaagatggtatatgctctgctgctttacatgtttcccaatttgtttggagatgaccatagattcattcgttatagaatgcatccaatgagtaaaatcaaacacaagatcttctctcctttcaaacttaatcttattagaatattagtggaagaaagattctataataatgaatgcagatctaataaatggagaataattggaacacaagttgataaaatgttgatagctgaatctgataattatacaatagatgcaaggtataacctaaaacccatgtatagaatcaagggagaatctgaagaagataccctctttatcaaacagatggtagaacaatgtgtgacatcccaggaattggtggaaaaagtgttgaagatactgtttagagatttgttcaagagtggagaatacaaagcgtacagatacgatgatgatgtagaaaatggatttattggattggatacactaaaattaaacattgttcatgatatagttgaaccatgtatgcctgttcgtaggccagtggctaagatactgtgtaaagaaatggtaaataaatactttgagaatccgctacatattattggtaaaaatcttcaagagtgcattgactttgttagtgaataggcatttcatctttctccaatactaattcaaattgttaaattaataatggatagtataaatagttattagtgataaaatagtaaaaataattattagaataagagtgtagtatcatagataactctcttctataaaaatggattttattcgtagaaagtatcttatatacacagtagaaaataatatagattttttaaaggatgatacattaagtaaagtaaacaattttaccctcaatcatgtactagctctcaagtatctagttagcaattttcctcaacatgttattactaaggatgtattagctaataccaatttttttgttttcatacatatggtacgatgttgtaaagtgtacgaagcggttttacgacacgcatttgatgcacccacgttgtacgttaaagcattgactaagaattatttatcgtttagtaacacaatacaatcgtacaaggaaaccgtgcataaactaacacaagatgaaaaatttttagaggttgccaaatacatggacgaattaggagaacttataggcgtaaattatgacttagttcttaatccattatttcacggaggggaacccatcaaagatatggaaatcatttttttaaaactgtttaagaaaacagacttcaaagttgttaaaaaattaagtgttataagattacttatttgggcatacctaagcaagaaagatacaggcatagagtttgcggataatgatagacaagatatatatactctatttcaacaaactggtagaatcgtccatagcaatctaacagaaacgtttagagattatatctttcccggagataagactagctattgggtgtggttaaacgaaagtatagctaatgatgcggatatcgttcttaatagacacgccattaccatgtatgataaaattcttagttatatatactctgagataaaacaaggacgcgttaataaaaacatgcttaagttagtttatatctttgagcctgaaaaagatatcagagaacttctgctagaaatcatatatgatattcctggagatatcctatctattattgatgcaaaaaacgacgattggaaaaaatattttattagtttttataaagctaattttattaacggtaatacatttattagtgataaaacgtttaacgaggacttattcagagttgttgttcaaataaatcccgaatatttcgataatgaacgaattatgtctttattctctacgagtgctgcggacattaaacgatttgatgagttagatattaataacagttatatatctaatataatttatgaggtgaacgatatcacattagatacaatggatgatatgaagaagtgtcaaatctttaacgaggatacgttgtattatgttaaggaatacaatacatacctgtttttgcacgagtcggatcccatggtcatagagaacggaatactaaagaaactgtcatctataaaatccaagagtagacggctgaacttgtttagcaaaaacattttaaaatattatttagacggacaattggctcgtctaggtcttgtgttagataattataaaggagacttgttagttaaaatgataaaccatcttaagtctgtggaggatgtatccgcattcgttcgattttctacagataaaaaccctagtattcttccatcgctaatcaaaactattttagctagttataatatttccatcatcgtcttatttcaaaggtttttgagagataatctatatcatgtagaagaattcttggataaaagcatccatctaaccaagacggataagaaatatatacttcaattgataagacacggtagatcatagaacagaccaaatatattattaataatttgtatatacatagatataattatcacatattaaaaattcacacatttttgataaatgggaactgctgcaacaattcagactcccaccaaattaatgaataaagaaaatgcagaaatgattttggaaaaaattgttgatcatatagttatgtatattagtgacgaatcaagtgattcagaaaataatcctgaatatattgattttcgtaacagatacgaagactatagatctctcattataaaaagtgatcacgagtttgtaaagctatgtaaaaatcatgcggagaaaagttctccagaaacgcaacaaatgattatcaaacacatatacgaacaatatcttattccagtatctgaagtactattaaaacctataatgtccatgggtgacataattacatataacggatgtaaagacaatgaatggatgctagaacaactctctaccctaaactttaacaatctccgcacatggaactcatgtagcataggcaatgtaacgcgtctgttttatacattttttagttatctgatgaaagataaactaaatatataagtataatcccattctaatactttaacctgatgtattagcatcttattagaatattaacctaactaaaagacataacataaaaactcattacatagttgataaaaagcggtaggatataaatattatggctgccaccgttccgcgttttgacgacgtgtacaaaaatgcacaaagaagaattctagatcaagaaacattttttagtagaggtctaagtagaccgttaatgaaaaacacatatctatttgataattacgcgtatggatggataccagaaactgcaatttggagtagtagatacgcaaacttagatgcaagtgactattatcccatttcgttgggattacttaaaaagttcgagtttctcatgtctctatataaaggtcctattccagtatacgaagaaaaagtaaatactgaattcatagccaatggatcgttctctggtagatacgtatcatatcttcgaaagttttctgctcttccaacaaacgagtttattagttttttgttactgacttccattccaatctataatatcttgttctggtttaaaaatactcagtttgatattactaaacacacattattcagatacgtctatacagataatgccaaacacctggcgttggctaggtatatgcatcaaacaggagactataagcctttgtttagtcgtctcaaagagaattatatatttaccggtcccgttccaataggtatcaaagatatagatcaccctaatcttagtagagcaagaagtccatccgattatgagacattagctaatattagtactatattgtactttaccaagtatgatccggtattaatgtttttattgttttacgtacctgggtattcaattactacaaaaattactccagcagtagagtatctaatggataaactgaaactaacaaagagcgatgtacaactgttgtgaatattttatgcttcgtaaaatgtaggttttgaaccaaacattctttcaaagaatgagatacataaaactttattatccaataaattgactatttcggatgtcaatcgtttaaagtaaacttcgtaaaatattctttgatcactgccgagtttaaaacttctatcgataattgtctcatatgttttaatatttacaagttttttggtccatggtacattagccggacaaatatatgcaaaataatatcgttctccaagttctatagtttctggattatttttattatattcagtaaccaaatacatattagggttatctgcggatttataatttgagtgatgcattcgactcaacataaataattctagaggagacgatctactatcaaattcggatcgtaaatctgtttctaaagaacggagaatatctatacatacctgattagaattcatccgtcctttagacaacatttcagacagtctggttttgtacatcttaatcatattcttatgaaacttggaaacatctcttctagtttcactagtacctttattaattctctcaggtacagattttgaattcgacgatgctgagtatttcatcgttgtatatttcttcttcgattgcataatcagattcttatataccgcctcaaactctattttaaaattattaaacaatactctattattaatcagttgttctaactctttcgctatttctatagacttatcgacatcttgactgtctatctctgtaaacacggagtcggtatctccatacacgctacgaaaacgaaatctgtaatctataggcaacgatgtttttacaatcggattaatatctctatcgtccatataaaatggattacttaatggattggcaaaccgtaacataccgttagataactctgctccatttagtaccgattctagatacaagatcattctacgtcctatggatgtgcaactcttagccgaagcgtatgagtatagagcactatttctaaatcccatcagaccatatactgagttggctactattttgtacgtatattgcatggaatcataaatggccttttcagttgaactggtagcctgttttagcatctttttatatctagctctctctgccaaaaatgttcttaatagtctaggaatggttccttctattgatctatcgaaaattgctatttcagagatgaggttcggtagtctaggttcacaatgaaccgtaatatatctaggaggtggatatttctgaagcaatagctgattatttatttcttcttccaatctattggtactaacaacgacaccgactaatgtttccggagatagatttccaaagatacacacattaggatacagactgttataatcaaagattaatacattattactaaacattttttgttttggagcaaataccttaccgccttcataaggaaacttttgttttgtttctgatctaactaagatagttttagtttccaacaatagctttaacagtggacccttgatgactgtactcgctctatattcgaataccatggattgaggaagcacatatgttgacgcacccgcgtctgtttttgtttctactccataatactcccacaaatactgacacaaacaagcatcatgaatacagtatctagccatatctaaagctatgtttagattataatccttatacatctgagctaaatcaacgtcatcctttccgaaagataatttatatgtatcattaggtaaagtaggacataatagtacgactttaaatccattttcccaaatatctttacgaattactttacatataatatcctcatcaacagtcacataattacctgtggttaaaacctttgcaaatgcagcggctttgcctttcgcgtctgtagtatcgttaccgatgaacgtcatttctctaactcctctatttaatactttacccatgcaactgaacgcgttcttggatatagaatccaatttgtacgaatccaatttttcagatttttgaatgaatgaatatagatcgaaaaatatagttccattattgttattaacgtgaaacgtagtattggccatgccgcctactcccttatgactagactgatttctctcataaatacagagatatacagcttcctttttgtctggagatctaaagataatcttctctcctgttaataactctagacgattagtaatatatctcagatcaaagttatgtccgttaaaggtaacgacatagtcgaacgttagttccaacaattgtttagctattcgtaacaaaactatttcagaacataaaactagttctcgttcgtaatccatttccattagtgactgtatcctcaaacatcctctatcgacggcttcttgtatttcctgttctgttaacatctcttcattaatgagcgtaaacaataatcgtttaccacttaaatcgatataacagtaacttgtatgcgagattgggttaataaatacagaaggaaacttcttatcgaagtgacactctatatctagaaataagtacgatcttgggatatcgaatctaggtatttttttagcgaaacagttacgtggatcgtcacaatgataacatccattgttaatctttgtcaaatattgctcgtccaacgagtaacatccgtctggagatatcccgttagaaatataaaaccaactaatattgagaaattcatccatggtggcattttgtatgctgcgtttctttggctcttctatcaaccacatatctgcgacggagcattttctatctttaatatctagattataacttattgtctcgtcaatgtctatagttctcatctttcccaacggcctcgcattaaatggaggaggagacaatgactgatatatttcgtccgtcactacgtaataaaagtaatgaggaaatcgtataaatacggtctcaccatttcgacatctggatttcagatataaaaatctgttttcaccgtgactttcaaaccaattaatgcaccgaacatccatttatagaatttagaaatatattttcatttaaatgaatcccaaacattggggaagagccgtatggaccattatttttatagtactttcgcaagcgggtttagacggcaacatagaagcgtgtaaacgaaaactatatactatagttagcactcttccatgtcctgcatgtagacggcacgcgactattgctatagaggacaataatgtcatgtctagcaatgatctgaattatatttattattttttcatcagattatttaacaatttggcatctgatcccaaatacgcaatcaatgtgtcaaaggttaaacctttataaacttaacccattataaaacttatgattagtcacgactgaaataaccgcgtgattattttttggtataattctacacggcatggtttctgtaactatgaattcaacccccgttacattagtgaaatctttaacaaacagcaagggttcgtcaaagacataaaactcattgtttacaatcgaaatagaccccctatcacacttaaaataaaaaatatccttatcctttaccaccaaataaaattctgattggtcaatgtgaatgtattcacttaacagttccacaaatttatttattaactccgaggcacatacatcgtcggtattttttatggcaaactttactcttccagcatccgtttctaaaaaaatattaacgagttccatttatatcatccaatattattgaaataacgttgatggacaaataatacaaataagaaggtacggtacctttgtccaccatctcctccaattcatgctctattttgtcattaactttaatgtatgaaaacagtacgccacatgcttccatgacagtgtgtaacactttggatacaaaatgtttgacattagtataattgttcaagactgtcaatctataatagatagtagctataatatattctatgatggtattgaagaagatgacaaccttggcatattgatcatttaacacagacatggtatcaacagatagcttgaatgaaagagaatcagtaattggaataagcgtcttctcgatagagtgtccgtataccaacatgtctgatattttgatgtattccattaaattatttagttttttctttttattttcgttaaacagcatttctgtcaacggaccccaacatcgttgaccgattaagttttgattgatttttccgtgtaaggcgtatctagtcagatcgtatagcctatccaataatccatcatctgtgcgtagatcacatcgtacactttttaattctttatagaagagcgacagacatctggagcaattacagacagcaatttctttattctctacagatgtaagatacttgaagacattcctatgatgatgcagaattttggataacacggtattgatggtatctgttaccataattcctttgatggctgatagtgtcagagcacaagatttccaatctttgacaatttttagcaccattatctttgttttgatatctatatcagacagcatggtgcgtctgacaacacagggattaagacggaaagatgaaatgattctctcaacatcttcaatggataccttgctattttttctggcattatctatatgtgcgagaatatcctctagagaatcagtatcctttttgatgatagtggatctcaatgacatgggacgtctaaaccttcttattctatcaccagattgcatggtgatttgtcttctttcttttatcataatgtaatctctaaattcatcggcaaattgtctatatctaaaatcataatatgagatgtttacctctacaaatatctgttcgtccaatgttagagtatctacatcagttttgtattccaaattaaacatggcaacggatttaattttatattcctctattaagtcctcgtcgataataacagaatgtagataatcatttaatccatcgtacatggttggaagatgcttgttgacaaaatctttaattgtcttgatgaaggtgggactatatctaacatcttgattaataaaatttataacattgtccataggatactttgtaactagttttatacacatctcttcatcggtaagtttagacagaatatcgtgaacaggtggtatattatattcatcagatatacgaagaacaatgtccaaatctatattgtttaatatattatatagatgtagcgtagctcctacaggaatatctttaactaagtcaatgatttcatcaaccgttagatctattttaaagttaatcatataggcattgatttttaaaaggtatgtagccttgactacattttcattaattaaccattccaagtcactgtgtgtaagaagattatattctatcataagcttgactacatttggtcccgataccattaaagaattcttatgatataaggaaacagcttttaggtactcatctactctacaagaattttggagagccttaacgatatcagtgacgtttattatttcaggaggaaaaaacctaacattgagaatgtcggagttaatagcttccagatacagtgattttggcaatagtccgtgtaatccataatccagtaacacgagctggtgcttgctagacaccttttcaatgtttaatttttttgaaataagctttgataaagccttcctcgcaaattccggatacatgaacatgtcggcgacatgattaagtattgttttttcattatttttatattttctcaacaagttctcaataccccaatagatgatagaatatcacccaatgcgtccatgttgtctatttccaacaggtcgctatatccaccaatagaagtttttccaaaaaagattctaggaacagttctaccaccagtaatttgttcaaaatagtcacgcaattcattttcgggtttaaattctttaatatcgacaatttcatacgctcctcttttgaaactaaacttatttagaatatccagtgcatttctacaaaaaggacatgtatacttgacaaaaattgtcactttgttattggccaacctttgttgtacaaattcctcggccattttaatatttaagtgatataaaactatctcgacttatttaactctttagttgagatatatggacgcagatagctatatgatagccaactacagaaggcaaacgctataaaaaacataattacgacgagcatatttataaatatttttattcagcattacttgatatagtaatattaggcacagtcaaacattcaactactttcgatacattaactttctcattttctttaacaaattctgcaatatcttcgtaaaaagattcttgaaactttttagaatatctatcgactctagatgaaatagcgttcgtcaacatactatgttttgtatacataaaggcgcctattttaacagtttctagtgacaaaatgctagcgatcctaggatcctttaaaatcacatagattgacgattcgtctctcttagtaactctagtaaaataatcatacaatctagtacgcgaaataatattatccttgacttgaggagatctaaacaatctagttttgagaacatcgataagttcatcgggaatgacatacatactatctttaatagaactcttttcatccagttgaatggattcgtccttaaccaactgattaatgagatcttctattttatcattttccagatgatacgtatgtccattaaagttaaattgtgtagcgcttctttttagtctagcagccaatactttaacatcactaatatcgatatacaaaggagatgatttatcgatggcattaagaattcgtttttcgacatctgtcaaaaccaattcctttttgcctgtatcgtccagtttgccattctttgtaaagaaattattttctactagactattaataagactgataaggattcctccataattgcacaatccaaactttttcacaaaactagactttacgagatctacaggaatgcgtacttcaggttttttagcttgtgattttttcttttgcggacattttctagtgaccaactcatctaccatttcattgattttagcagtgaaataagctttcaatgcacgggcactgatactattgaaaacgagttgatcttcaaattccgccatttaagtttaccaaacaacttttaaatacaaatatatcaatagtagtagaataagaactataaaaaaaataataattaaccaataccaaccccaacaacctgtattattagttgatgtggtagttttctcatcacttagaacagatttaacaatttctataaagtctgtcagatctgtcaaatcatctttcggagaacccatatatacaccaaatatagcggcgtacaacttatccatttatacattaaatattggcttttctttatcgctatcttcatcatattcatcatcaatatcaacaagtcccagattacgagccagatcttcttctacattttcagtcattgatacacgttcactatctccagagagtccgataacgttagccaccacttctctatcaatgattagtttcttgagcgcgaaagtaatttttgtttctgttccggatctatagaagacgataggtgtgataattgccttggccaattgtctttctcttttactgagtgattctagttcaccttctatagatctgagaatggatgattctccagccgaaacatattctaccatggctccgtttaatttgttgatgaagatggattcatccttaaatgttttctctgtaatagtttccaccgaaagactatgcaaagaatttggaatgtgttccttgtgcttaatgtttccatagacagcttctagaagttgatacaacataggactagccgcggtaacttttatttttagaaagtatccatcgcttctatcttgtttagatttatttttataaagtttagtctctccttccaacataataaaagtggaagtcatttgactagataaactatcagtaagttttatagagatagatgaacaattagcgtattgagaagcatttagtgtgacgtattcgatacattttgcattagatttactaatcgattttgcatactctataacacccgcacaagtctgtagagaatcgctagatgctgtaggtcttggtgaagtttcaactctcttcttaattaccttactcatgattaaacctaaataattgtactttgtaatataatgatatatattttcactttatctcatttgaaaataaaaatgtttttgtttaaccgctgcatgatgtacagatttcggaatcacaaaccactggtggttttattttatccttgtccaatgtgaattgaatgggagcggatgcgggtttcgtacgtagatagtacatttccgtttttagaccgagactccatccgtaaaaatgcatactcgttagtttgaaataactcggatctgctatatggatattcatagattgactttgatcgatgaaggctcccctgtctgcagccatttttatgatcgtcttttgtgaaatttcccaaatagttttataaactcgcttaatatcttctggaaggtttgtattctaagtggatccaccatctgccataatcctattcttgatctcatcatttcataattttttctcggttaaaactctaaggagatgcggattaactacttgaaattctccagacaatactctccgagtgtaaatattactggtatatggtttcaccgactcattattttccaaaatttgagcagttgatgccgtcggcataggtgccaccaataaactatttctaagaccgtatgttttgattttatcttttagaggtttccaattccaaagatctgacggtacaacattccaaagatcatattgtagaataccgttactggcgtacgatcttacatatgattcataaggtccttccttttcagctagttcacaactcgcatctaatgcaccgtaggtttcgaagatcttcttatttagatcttgtgcttccaggctatcaaatggataatttaagagaataaacgcgtccgctaatccttgaacaccaataccgataggtctatgtctcttattagagatttcagcttttggaataggataataattaatatctataattttattgagatttctgacaattactttgaccacatcctttagtttgaaaaaatcaaattgtccatctattacaaacatgtttaacgcgacagatgccagattacaaacggctacctcattagcatctgcatattgtattatttcagtgcagaggttactacacttaatggttcctaaattttgttgattactctttttgttacacgcatccttataaagaatgaacggagtaccagtttcaatctgagattctataatcgctttccagacgactcgagccttcatatagtcttgtatctcttttctctttcgtattgtatataatcgttcgaactcgtctccccaaacattgtttaatccagaacattcatccaaacacatcaacgaccactctccgtcatccttcactcgtttcataaagagatcaggaatccaaagagctataaataaatctctggttctatgtttctcgtttcctgtattctttttaaaatcgaggaacgccataatatcagaatgccacggttccaagtatatggccataactcccggtcgtttgtttcctccctgatccatgtatctagcggtgttattataaactctcaacattggaataataccgtttgatataccattagtaccggagatatagcttccactggcacgaatattactaattgataaacctattccccctgccattttagagattaatgcgcatcgttttaacgtatcatagatgccctctatactatcatccatcatgttaagtaaaaaaacatctagacatttggtgacgactagttctcgcattaaataaggtaggagaagcgtgcgtaaaccatttttcagaaagtagattgtacgtctcaatagctaagtctatattccattgatgtatttttaccgcgacacgcattaacatgtgctgaggtttttcaacgatcttgttgtttatttttaacaagtaggatttttccaaagttttaaaaccaaaatagttgtatgaaaagtttcgttcgtaaataataaccgaattgagtttatccttatatttgttaactatatccatggtgatacttgaaataatcggagaatgtttcccatttttaggattaacatagttgaataaatccttcatcacttcactaaatagttttttgtttccttgtgtagatttgatacggctattctggcggctagaatggcataatccggatgttgtgtagtacaagtggctgctatttcggctaccagagtgttcaattctaccgttgttactccattatatattccttgaataaccttcatagctattttaataggatctatatgatccgtgtttaagccataacataattttctaatacgagacgtaattttatcaaacatgacattttccttgtatccatttcgtttaatgacaaacatttttgttggtgtaataaaaaaaattatttaacttttcattaatagggatttgacgtacgtagcgtacaaaatgattgttcctggtatatagataaagagtcctatatatttgaaaatcgttacggctcgattaaactttaatgattgcattgtgaatatatcattaggatttaactccttgactatcagggcggcaccagaaatcaccatcaaaagcattaatacagttatgcctatcgcagttagaacggttatagcatccaccatttatatctaaaaattagatcaaagaatatgtgacaaagtcctagttgtatattgagaattgacgaaacaatgtttcttacatattttttttttattagtaaccgacttaatagtaggaactggaaaactagacttgattattctataagtatagatacccttccagataatgttctctttgataaaagttccagaaaatgtagaattttttaaaaagttatcttttgctattaccaagattgtgtttagacgcttattattaatatgagtaatgaaatccacaccgcctctagatatcgcctttatttccacattagatggtaaatccaatagtgaaactatctttttaggaatgtatggactcgcgtttagaggagtgaacgtcttgggcgtcggaaaggatgattcgtcaaacgaataaacaatttcacaaatggatgttaatgtattagtaggaaatttcttgacgctattggagttgaagattctaatggatgatgttctacctatttcatccgataacatgttaatttccgacaccaacggttttaatatttcgatgatatacggtagtctctctttcggacttatatagcttattccacaatacgagtcattatatactccaaaaaacaaaataactagtataaaatctgtatcgaatgggaaaaacgaaattatcgacataggtatagaatctggaacattgaacgtattaatacttaattctttttctgtggtaagtaccgataggttattgacattgtatggttttaaatattctataacttgagacttgatagatattagtgatgaattgaaaattatttttatcaccacgtgtgtttcaggatcgtcgtcgacgcccgtcaaccaaccgaacggagtaaaataaatatcattaatatatgctctaaatattagtatttttattaatcctttgattatcatcttctcgtacgcgaatgattccatgatcaagagtgatttgagaacatcctccggagtattaatgggcttagtaaacagtacatcgttgcaataataaaagttatccaagttaaaggatattatgcattcgtttaaagatatcacctcatctgacggagacaattttttggtaggttttagagactttgaagctacttgtttaacaaagttattcatcgtcgtttactattctatttaattttgtagttaatttatcacatatcacattaattgactttttggtccacttttccatacgtttatattcttttaatcctgcgttatccgtttccgttatatccagtgatagatcgtgcaagttaaatagaatgctcttaaataatgtcattttcttatccgctaaaaatttaaagaatgtataaacctttttcagagatttgaaactcttaggtggtgtcctagtacacaatatcataaacaaactaataaacattccacattcagattccaacagctgattaacttctacattaatacagcctattttcgctccaaatgtacattcgaaaaatctgaataaaacatcaatgtcgcaatttgtattatccaatacagaatgtttgtgattcgtgttaaaaccatcggagaaggaatagaaataaaaattattatagtggtggaattcagttggaatattgcctccggagtcataaaaggatactaaacattgttttttatcataaattacacatttccaatgagacaaataacaaaatccaaacattacaaatctagaggtagaacttttaattttgtctttaagtatatacgataagatatgtttattcataaacgcgtcaaatttttcatgaatcgctaaggagtttaagaatctcatgtcaaattgtcctatataatccacttcggatccataagcaaactgagagactaagttcttaatacttcgattgctcatccaggctcctctctcaggctctattttcatcttgacgacctttggattttcaccagtatgtattcctttacgtgataaatcatcgattttcaaatccatttgtgagaagtctatcgccttagatactttttcccgtagtcgaggtttaaaaaaatacgctaacggtatactagtaggtaactcaaaaacatcatatatagaatggtaacgcgtctttaactcgtcggttaactctttcttttgatcgagttcgtcgctactattgggtctgctcaggtgccccaactctactagttccaacatcataccgataggaatacaagacactttgccagcggttgtagatttatcatatttttccactacatatccgttacaatttgttaaaaatttagatacatctatattgctacataatccagctagtgaatatatatgacataataaattggtaaatcctagttctggtattttactaattactaaatctgtatatctttccatttatcatggaaaagaatttaccagatatcttcttttttccaaactgcgttaatgtattctcttacaaatattcacaagatgaattcagtaatatgagtaaaacggaacgtgatagtttctcattggccgtgtttccagttataaaacatagatggcataacgcacacgttgtaaaacataaaggaatatacaaagttagtacagaagcacgtggaaaaaaagtatctcctccatcactaggaaaacccgcacacataaacctaaccacgaaacaatatatatacagtgaacacacaataagctttgaatgttatagttttctaaaatgtataacaaatacagaaatcaattcgtttgatgagtatatattaagaggactattagaagctggtaatagtttacagatattttccaattccgtaggtaaacgaacagatactataggtgtactagggaataagtatccatttagcaaaattccattggcctcattaactcctaaagcacaacgagagatatttttagcgtggatttctcatagacctgtagttttaactggaggaaccggagtgggtaagacgtcacaggtacccaagttattgctttggtttaattatttatttggtggattctttactctagataaaatcactaactttcacgaaagaccagtcattctatctcttcctaggatagctttagttagattgcatagcaataccattttaaaatcattgggatttaaggtactagatggatctcctatttctttacggtacggatctataccggaagaattaataaacaaacaaccaaaaaaatatggaattgtattttctacccataagttatctctaacaaaactatttagttatggcactcttattatagacgaagttcatgagcatgatcaaataggagatattattatagcagtagcgagaaagcatcatacgaaaatagattctatgtttttaatgactgccacattagaggatgaccgagaacggctaaaagtatttttacctaatcccgcatttatacatattcctggaaatacactgtttaaaattagcgaggtatttattcataataagataaatccatcttccagaatggcatacatagaagaagaaaagagaaatttagttactgctatacagatgtatactcctcctgatggatcatccggtatagtctttgtggcatccgttgcacagtgtcacgaatataaatcatatttagaaaaaagattaccgtatgatatgtatattattcatggtaaggtcttagatatagacgaaatattagaaaaagtgtattcatcacctaatgtatcgataattatttctactccttatttggaatccagcgttactatacgcaatgttacacacatttatgatatgggtagagtttttgttcccgctccttttggaggatcgcaagaatttatttctaaatctatgagagatcaacgaaaaggaagagtaggaagagttaatcctgggacatacgtatatttctatgatctgtcttatatgaagtctatacagcgaatagattcagaatttctacataattatatattgtacgctaataagtttaatctaacactccccgaagatttgtttataatccctacaaatttggatattctatggcgcacaaaggaatatatagactcgttcgatattagtacagaaacatggaataaattattatccaattattatatgaagatgatagagtatgctaaactttatgtactaagtcctattctcgctgaggagttggataattttgagaggacgggagaattaactagtattgtacaagaagccattttatctctaaatttacgaattaagattttaaattttaaacataaagatgatgatacgtatatacacttttgtaaaatattattcggtgtctataacggaacaaacgctactatatattatcatagacctctaacgggatatatgaatatgatttcagatactatatttgttcctgtagataataactaaaaattaaactctaatgaccacatctttttttaaagatgaaaaattttctacatctccttttgtagacacaactaaacattttgcagaaaaaagtttattattgtttagataatcgtatacttcatcagtgtagatagtaaatgtgaacaaataaaaggtattcttactcaatagattggtaaattccatagaatatattagtcctttcttcttgagatcccacatcatttcaaccagagacgttttatccaatgatttacctcgtactataccacatacaaaactagattttgcagtgacgttgtacctggtattcctaccaaacaaaattttacttttagttcttttagaaaattctaaggtagaatctctatttgccaatatgtcatctatggaattaccactagcaaaaaatgatagaaatatatattgatacatcgcagctggttttgatctactatactttaaaaacgaatcagattccataattgcctgtatatcatcagctgaaaaactatgttttacacgtattccttcggcatttctttttaatgatatatcttgtttagacaatgataaagttatcatgtccatgagagacgcgtctccgtatcgtataaatatttcattagatgttagacgcttcattaggggtatacttctataaggtttcttaattagtccatcatttgttgcgtcaagaactactatcggatgttgttgggtatctctagtgttacacatggccttactaaagtttgggtaaataactatgatatctctattaattatagatgcatatatttcatttgtcaaggatattagtatcgacttgctatcgtcattaatacgtgtaatgtaatcatataaatcatgcgatagccaaggaaaatttaaatagatgttcatcatataatcgtcgctataattcatattaatacgttgacattgactaatttgtaatatagcctcgccacgaagaaagctctcgtattcagtttcatcgataaaggataccgttaaatataactggttgccgatagtctcatagtctattaagtggtaagtttcgtacaaatacagaatccctaaaatattatctaatgttggattaatctttaccataactgtataaaatggagacggagtcataactattttaccgtttgtacttactggaatagacgaaggaataatctccggacatgctggtaaagacccaaatgtctgtttgaagaaatccaatgttccaggtcctaatctcttaacaaaaattacaatattcgatcccgatatcctttgcattctatttaccagcatatcacgaactatattaagattatctatcatgtctattctcccaccgttatataaatcgcctccgctaagaaacgttagtatatccatacaatggaatacttcatttctaaaatagtattcgttttctaattctttaatgtgaaatcgtatactagaaagggaaaaattatctttgagttttccgttagaaaaaaaccacgaaactaatgttctgattgcgtccgattccgttgctgaattaatggatttacaccaaaaactcatataacttctagatgtagaagcattcgctaaaaaattagtagaatcaaaggatataagtagatgttccaacaagtgagcaattcccaagatttcatctatatcattttcgaatccgaaattagaaattcccaagtagatatcctttttcatccgatcattgatgaaaatacgaactttattcggtaagacaatcatttactaaggagtaaaataggaagtaatgttcgtatgtcgttatcatcgtataaattaaaggtgtgttttttaccattaagtgacattataattttaccaatattggaattataatataggtgtatttgcgcactcgcgacggttgatgcatcggtaaatatagctgtatctaatgttctagtcggtatttcatcatttcgctgtctaataatagcgttttctctatctgtttccattacagctgcctgaagtttattggtcggataatatgtaaaataataagaaatacatacgaataacaaaaataaaataagatataataaagatgccatttagagatctaattttgtttaacttgtccaaattcctacttacagaagataaggaatcgttggagttagtgtcttccttatgtaggggatttgaaatatcttataatgacttaataacttactttccagataggaaataccataaatatatttctaaagtatttgaacatgtagatttatcggaggaattaagtatggaattccatgatacaactttgcgagatttagtttatcttagattgtacaagtattccaagtgtatacggccgtgttataaattaggagataatctaaaaggcatagttgttataaaggacagaaatatatatattagagaagcaaatgatgacttgatagaatatctcctcaaggaatacactcctcagatttatacatattctaatgagcgagttcccatagctggttcaaaattaattctttgtggattttctcaagttacatttatggcgtatacaacgtctcatataacaacaaataaaaaggtagatgttctcgtttccaaaaaatgtatagatgaactagtcgatccaataaattatcaaatacttcaaaatttatttgataaaggaagcggaacaataaacaaaatactcaggaagatattttattcggtaaccggtggccaaactccataatttgctttttctatttcggattttagaatttccaaattcaccagcgatttatctgttttggtgaaatccaaggatttattaatgtccacaaatgccatttgttttgtctgtggattgtatttgaaaatggaaacgatgtagttagatagatgcgctgcgaagtttcctattagggttccgcgcttcacgtcacccagcatacttgaatcaccatcctttaaaaaaaatgataagatatcaacatggagtatatcatactcggattttaattcttctactgactcactgacattttcacaaatactacaatacggtttaccgaaaataatcaatacgttcttcatttatgggtatcaaaaacttaaaatcgttactgctggaaaataaatcactgacgatattagatgataatttatacaaagtatacaatggaatatttgtggatacaatgagtatttatatagccgtcgccaattgtgtcagaaacttagaagagttaactacggtattcataaaatacgtaaacggatgggtaaaaaagggagggcatgtaaccctttttatcgatagaggaagtataaaaattaaacaagacgttagagacaagagacgtaaatattctaaattaaccaaggacagaaaaatgttagaattagaaaagtgtacatccgaaatacaaaatgttaccggatttatggaagaagaaataaaggcagaaatgcaattaaaaatcgataaacttacatttcaaatatatttatctgattctgataacataaaaatatcattgaatgagatactaacacatttcaacaataatgagaatgttacattattttattgtgatgaacgagacgcagaattcgttatgtgtctcgaggctaaaacacatttctctaccacaggagaatggccgttgataataagtaccgatcaggatactatgctatttgcatctgctgataatcatcctaagatgataaaaaacttaactcaactgtttaaatatgttccatctgcagaggataactatttagcaaaattaacggcgttagtgaatggatgtgatttctttcctggactctatggggcatctataacacccaccaacttaaacaaaatacaattgtttagtgattttacaatcgataatatagtcactagtttggcaattaaaaattattatagaaagactaactctaccgtagacgtgcgtaatattgttacgtttataaacgattacgctaatttagacgatgtctactcgtatattcctccttgtcaatgcactgttcaagaatttatattttccgcattagatgaaaaatggaacaattttaaatcatcttatttagagaccgttccgttaccctgtcaattaatgtacgcgttagaaccacgtaaggagattgatgtttcagaagttaaaactttatcatcttatatagatttcgaaaatactaaatcagatatcgatgttataaaatctatatcctcgatcttcggatattctaacgaaaactgtaacacgatagtattcggcatctataaggataatttactactgagtataaataattcattttactttaacgatagtctgttaataaccaatactaaaagtgataatataataaatataggttactagattaaaaatggtgttccaactcgtgtgctctacatgcggtaaagatatttctcacgaacgatataaattgattatacgaaaaaaatcattaaaggatgtactcgtcagtgtaaagaacgaatgttgtaggttaaaattatctacacaaatagaacctcaacgtaacttaacagtgcaacctctattggatataaactaatatggatccggttaattttatcaagacatatgcgcctagaggttctattatttttattaattataccatgtcattaacaagtcatttgaatccatcgatagaaaaacatgtgggtatttattatggtacgttattatcggaacacttggtagttgaatcaacatatagaaaaggagttcgaatagtcccattggatagtttttttgaaggatatcttagtgcaaaagtatacatgttagagaatattcaagttatgaaaatagcagctaatacgtcgttaactttactaggtattccatatggatttggtcatgatagaatgtattgttttaaattggtagctgactgttataaaaatgccggtgttgaaacatcgtctaaacgaatattaggtaaagatatttttctgagccaaaacttcacagacgataatagatggataaagatatatgattctaataatttaacattttggcaaattgattaccttaaagggtgagttaatatgcataactactcctccgttgttttttccctcgttctttttcttaacgttgtttgccatcactctcataatgtaaagatattctaaaatggtaaacttttgcatatcggacgcagaaattggtataaatgttgtaattgtattatttcccgtcaatggactagtcacagctccatcagttttatatcctttagagtatttctcactcgtgtctaacattctagagcattccatgatctgtttatcgttgatattggccggaaagatagattttttattttttattatattactattggcaattgtagatataacttctggtaaatatttttctaccttttcaatctcttctattttcaagccggctatatattctgctatattgttgctagtatcaataccttttctggctaagaagtcatatgtggtattcactatatcagttttaactggtagttccattagcctttccacttctgcagaataatcagaaattggttctttaccagaaaatccagctactataataggctcaccgatgatcattggcaaaatcctatattgtaccagattaatgagagcatatttcatttccaataattctgctagttcttgagacattgatttatttgatgaatctagttggttctctagatactctaccatttctgccgcatacaataacttgttagataaaatcagggttatcaaagtgtttagcgtggctagaatagtgggcttgcatgtattaaagaatgcggtagtatgagtaaaccgttttaacgaattatatagtctccagaaatctgtggcgttacatacatgagccgaatgacatcgaagattgtccaatatttttaatagctgctctttgtccattatttctatatttgactcgcaacaattgtaaataccattaatcactgattcctttttcgatgccggacaatagcacaattgtttagctttggactctatgtattcagaattaatagatatatctcttaatacagattgcactatacattttgaaactatgtcaaaaattgtagaacgacgctgttctgcagccatttaactttaaataatttacaaaaatttaaaatgagcatccgtataaaaatcgataaactgcgccaaattgtggcatatttttcagagttcagtgaagaagtgtctataaatgtagactcgacggatgagttaatgtatatttttgccgccttgggtggatctgtaaacatttgggccattatacctctcagtgcatcagtgttctaccgcggagccgaaaatattgtgtttaatcttccggtgtccaaggtaaaatcgtgtttgtgtagttttcacaatgatgccatcatagatatagaacctaatctggaaaataatctagtaaaactttctagttatcatgtagtaagtgtcgattgtaacaaggaactgatgcctattaggacagatactactatttgtctaagtatagatcaaaagaaatcttacgtgtttaattttcacaagtatgaagaaaaatgttgtggtagaaccgtcattcatttagaatggttgttgggctttatcaagtgtattagtcagcatcagcatttggctattatgtttaaagatgacaatattattatgaagactcctggtaatactgatgcgttttccagggaatattctatgactgaatgttctcaagaactacaaaagttttctttcaaaatagctatctcgtctctcaacaaactacgaggattcaaaaagagagtcaatgtttttgaaactagaatcgtaatggataatgacgataacattttaggaatgttgttttcggatagagttcaatcctttaagatcaacatctttatggcgtttttagattaatactttcaatgagataaatatgggtggcggagtaagtgttgagctccctaaacgggatccgcctccgggagtacccactaatgagatgttattaaacgttgataaaatgcatgacgtgatagctcccgctaagcttttagaatatgtgcatataggaccactagcaaaagataaagaggataaagtaaagaaaagatatccagagtttagattagttaacacaggacccggtggtctttcagcattattaagacaatcgtataatggaaccgcacccaattgctgtcgcacttttaatcgtactcattattggaaaaaggatggaaagatatcagataagtatgaagagggtgcaatattagaatcgtgttggccagacgttcacgacaccggaaaatgcgatgttgatttattcgactggtgtcagggggatacgttcgatagaaacatatgccatcagtggatcggttcagcctttaataggagtaatagaactgtagagggtcaacaatcgttaataaatctgtataataagatgcaaacattatgtagtaaagatgctagtgtaccaatatgcgaatcatttttgcattatttacgcgcacacaatacagaagatagcaaagagatgatcgattatattctaagacaacagtctgcggactttaaacagaaatatatgagatgtagttatcccactagagataagttagaagagtcattaaaatatgcggaacctcgagaatgttgggatccagagtgttcgaatgccaatgttaatttcttactaacacgtaattataataatttaggactttgcaatattgtacgatgtaataccagcgtgaacaacttacagatggataaaacttcctcattaagattgtcatgtggattaagcaatagtgatagattttctactgttcccgtcaatagagcaaaagtagttcaacataatattaaacactcgttcgacctaaaattgcatttgatcagtttattatctctcttggtaatatggatactaattgtagctatttaaatgggtgccgcagcaagcatacagacgacggtgaatacactcagcgaacgtatctcgtctaaattagaacaagaagcgaatgctagtgctcaaacaaaatgtgatatagaaatcggaaatttttatatccgacaaaaccatggatgtaacctcactgttaaaaatatgtgctctgcggacgcggatgctcagttggatgctgtgttatcagccgctacagaaacatatagtggattaacaccggaacaaaaagcatacgtaccagctatgtttactgctgcgttaaacattcagacaagtgtaaacactgttgttagagattttgaaaattatgtgaaacagacttgtaattctagcgcggtcgtcgataacaaattaaagatacaaaacgtaatcatagatgaatgttacggagccccaggatctccaacaaatttggaatttattaatacaggatctagcaaaggaaattgtgccattaaggcgttgatgcaattgactactaaggccactactcaaatagcacctaaacaagttgctggtacaggagttcagttttatatgattgttatcggtgttataatattggcagcgttgtttatgtactatgccaagcgtatgctgttcacatccaccaatgataaaatcaaacttattttagccaataaggaaaacgtccattggactacttacatggacacattctttagaacttctccgatggttattgctaccacggatatgcaaaactgaaaatatattgataatattttaatagattaacatggaagttatcgctgatcgtctagacgatatagtgaaacaaaatatagcggatgaaaaatttgtagattttgttatacacggtctagagcatcaatgtcctgctatacttcgaccattaattaggttgtttattgatatactattatttgttatagtaatttatatttttacggtacgtctagtaagtagaaattatcaaatgttgttggtgttggtggcgctagtcatcacattaactattttttattactttatactataatagtactagactgacttctaacaaacatctcacctgccataaataaatgcttgatattaaagtcttctatttctaacactattccatctgtggaaaataatactctgacattatcgctaattgacacatcggtgagtgatatgcctataaagtaataatcttctttgggcacatataccagtgtaccaggttctaacaacctatttactggtgctcctgtagcatactttttctttaccttgagaatatccatcgtttgcttggtcaatagcgatatgtgattttttatcaaccactcaaaaaagtaattggagtgttcatatcctctacgggctattgtctcatggccgtgtatgaaatttaagtaacacgactgtggtagatttgttctatagagccgattgccgcaaatagatagaactaccaatatgtctgtacaaatgttaaacattaattgattaacagaaaaaacaatgttcgttctgggaatagaaaccagattaaaacaaaattcgttagaatatatgccacgtttatacatggaatataaaataactacagtttgaaaaataacagtatcatttaaacatttaacttgaggggttaatttcacaactttactgtttttgaactgttcaaaatatagcatcgatccatgagaaatacgtttagccgcctttaatagaggaaatcctaccgcctttctggatctcaccaacgacgatagttctgaccagcaacttatttcttcatcatccacctgttttaacatataataggcaggagatagatatccgtcattgcaatattccttttcgtaggcacacaatctaatattgataaaatctccattctcttctctgcatttattatcttgtttcggtggctgattaggctgtagtcttggtttaggctttggtatatcgttgttgaatctattttggtcattaaatctttcatttcttcctggtatatttttatcacctcgtttggttggatttttgtctatattatcgtttgtaacatcggtacgggtattcatttatcacaaaaaaaacttctctaaatgagtctactgctagaaaaccttatcgaagaagataccatattttttgcaggaagtatatctgagtatgatgatttacaaatggttattgccggcgcaaaatccaaatttccaagatctatgctttctatttttaatatagtacctagaacgatgtcaaaatatgagttagagttgattcataacgaaaatatcacaggagcaatgtttaccacaatgtataatataagaaacaatttgggtctaggagatgataaactaactattgaagccattgaaaactatttcttggatcctaacaatgaagttatgcctcttattattaataatacggatatgactgccgttattcctaaaaaaagtggtaggagaaagaataaaaacatggttatcttccgtcaaggatcatcacctatcttgtgcattttcgaaactcgtaaaaagattaatatttataaagaaaatatggaatccgcatcaactgagtatacacctatcggagacaacaaggctttgatatctaaatatgcgggaattaatatcctgaatgtgtattctccttccacatccataagattgaatgccatttacggattcaccaataaaaataaactagagaaacttagtactaataaggaactagaatcgtatagttctagccctcttcaagaacccattaggttaaatgattttctgggactattggaatgtattaaaaagaatattcctctaacagatattccgacaaaggattgattactataaatggagaatgttcctaatgtatactttaatcctgtgtttatagagcccacgtttaaacattctttattaagtgtttataaacacagattaatagttttatttgaagtattcattgtattcattctaatatatgtattttttagatctgaattaaatatgttcttcatgcctaaacgaaaaatacccgatcctattgatagattacgacgtgctaatctagcgtgtgaagacgataagttaatgatctatggattaccatggatgacaactcaaacatctgcgttatcaataaatagtaaaccgatagtgtataaagattgtgcaaagcttttgcgatcaataaatggatcacaaccagtatctcttaacgatgttcttcgcagatgatgattcattttttaagtatttggctagtcaagatgatgaatcttcattatctgatatattgcaaatcactcaatatctagactttctgttattattattgatccaatcaaaaaataaattagaagccgtgggtcattgttatgaatctctttcagaggaatacagacaattgacaaaattcacagactttcaagattttaaaaaactgtttaacaaggtccctattgttacagatggaagggtcaaacttaataaaggatatttgttcgactttgtgattagtttgatgcgattcaaaaaagaatcctctctagctaccaccgcaatagatcctattagatacatagatcctcgtcgtgatatcgcattttctaacgtgatggatatattaaagttgaataaagtgaacaataattaattctttattgtcatcatgaacggcggacatattcagttgataatcggccccatgttttcaggtaaaagtacagaattaattagacgagttagacgttatcaaatagctcaatataaatgcgtgactataaaatattctaacgataatagatacggaacgggactatggacgcatgataagaataattttgaagcattggaagcaactaaactatgcgatgttttggaattaattacagatttctccgtgataggtatcgatgaaggacagttctttccagacattgttgaattctgtgagcgtatggcaaacgaagaaaaaatagttatagtagccgcactcgatgggacatttcaacgtaaaccgtttaataatattttgaatcttattccattatctgaaatggtggtaaaactaactgctgtgtgtatgaaatgctttaaggaggcttccttttctaaacgattgggtgaggaaaccgagatagagataataggaggtaatgatatgtatcaatcggtgtgtagaaagtgttacgtcggctcataatattatattttttatctaaaaaactaaaaataaacattgattaaattttaatataatacttaaaaatggatgttgtgtcgttagataaaccgtttatgtattttgaggaaattgataatgagttagattacgaaccagaaagtgcaaatgaggtcgcaaaaaaactaccgtatcaaggacagttaaaactattactaggagaattattttttcttagtaagttacagcgacacggtatattagatggtgccaccgtagtgtatataggatcggctcctggtacacatatacgttatttgagagatcatttctataatttaggaatgattatcaaatggatgctaattgacggacgccatcatgatcctattctaaatggattgcgtgatgtgactctagtgactcggttcgttgatgaggaatatctacgatccatcaaaaaacaactgcatccttctaagattattttaatttctgatgtaagatccaaacgaggaggaaatgaacctagtacggcggatttactaagtaattacgctctacaaaatgtcatgattagtattttaaaccccgtggcatctagtcttaaatggagatgcccgtttccagatcaatggatcaaggacttttatatcccacacggtaataaaatgttacaaccttttgctccttcatattcagctgaaatgagattattaagtatttataccggtgagaacatgagactgactcgagttaccaaattagacgctgtaaattatgaaaaaaagatgtactaccttaataagatcgtccgtaacaaagtagttgttaactttgattatcctaatcaggaatatgactattttcacatgtactttatgctgaggaccgtatactgcaataaaacatttcctactactaaagcaaaggtactatttctacaacaatctatatttcgtttcttaaatattccaacaacatcaactgaaaaagttagtcatgaaccaatacaacgtaaagtatctagcaaagattttatgtctaaaaacagaaatagcaagagatccgtacgcagtaataaatagaaacgtactactgagatatactaccgatatagagtataatgatttagttactttaataaccgttagacataaaattgattctatgaaaactgtgtttcaggtatttaacgaatcatccataaattatactccggttgatgatgattatggagaaccaatcattataacatcgtatcttcaaaaaggtcataacaagtttcctgtaaattttctatacatagatgtggtaatatctgacttatttcctagctttgttagactagatactacagaaactaatatagttaatagtgtactacaaacaggtgatggtaaaaagactcttcgtcttcccaaaatgttagagacggaaatagttgtcaagattctctatcgccctaatataccattaaaaattgttagatttttccgcaataacatggtaactggagtagagatagccgatagatctgttatttcagtcgctgattaatcaattagtagagatgagataagaacattataataatcaataatatatcttatatcttatatcttatatcttatatcttatatcttatatcttatatcttatatcttatatcttatatcttgtttagaaaaatgctaatattaaaatagctaacgctagtaatccaatcggaagccatttgatatctataatagggtatctaatttcctgatttaaatagcggacagctatattctcggtagctactcgtttggaatcacaaacattatttacatctaatttactatctgtaatggaaacgtttcccaatgaaatggtacaatccgatacattgcatcttgttatatttttttttaaagaggctggtaacaacgcatcgcttcgtttacatggctcgtaccaacaataatagggtaatcttgtatctattcctatccgtactatgcttttatcaggataaatacatttacatcgtatatcgtctttgttagcatcacagaatgcataaatttgttcgtccgtcatgataaaaatttaaagtgtaaatataactattatttttatagttgtaataaaaagggaaatttgattgtataccttcggttctttaaaagaaactgacttgataaaaatggctgtaatctctaaggttacgtatagtctatatgatcaaaaagagattaatgctacagatattatcattagtcatgttaaaaatgacgacgatatcggtaccgttaaagatggtagactaggtgctatggatggggcattatgtaaaacttgtgggaaaacggaattggaatgtttcggtcactggggtaaagtaagtatttataaaactcatatagttaagcctgaatttatttcagaaattattcgtttactgaattatatatgtattcactgcggattattgcgttcacgagaaccgtattccgacgatattaacctaaaagagttatcgggacacgctcttaggagattaaaggataaaatattatccaagaaaaagtcatgttggaacagtgaatgtatgcaaccgtatcaaaaaattactttttcaaagaaaaaggtttgtttcgtcaacaagttggatgatattaacgttcctaattctctcatctatcaaaagttaatttctattcatgaaaagttttggccattattagaaattcatcaatatccagctaacttattttatacagactactttcccatccctccgttgattattagaccggctattagtttttggatagatagtatacccaaagaaaccaatgaattaacttacttattaggtatgatcgttaagaattgtaacttgaatgctgatgaacaggttatccagaaggcggtaatagaatacgatgatattaaaattatttctaataacactaccagtatcaatttatcatatattacatccggcaaaaataatatgattagaagttatatcgtcgcccgacgaaaagatcagacggctagatctgtaattggtcccagtacatctatcaccgttaatgaggtaggaatgcccgcatatattagaaatacacttacagaaaagatatttgttaatgcctttacagtggataaagttaaacaactattagcgtcaaaccaagttaaattttactttaataaacgattaaaccaattaacaagaatacgccaaggaaagtttattaaaaataaaatacatttattgcctggtgattgggtagaagtagctgttcaagaatatacaagtattatttttggaagacagccgtctctacatagatacaacgtcatcgcttcatctatcagagctaccgaaggagatactatcaaaatatctcccggaattgccaactctcaaaatgctgattttgacggggatgaggaatggatgatattagaacaaaatcctaaagctgtaattgaacaaagtattcttatgtatccgacaacgttactcaaacacgatattcatggagcccctgtttatggatctattcaagatgaaatcgtagcagcgtattcattgtttaggatacaagatctttgtttagatgaagtattaaacatcttggggaaatatggaagaaagttcgatcctaaaggtaaatgtaaattcagcggtaaagatatctatacttacttgataggtgaaaagattaattatccgggtctcttaaaggatggtgagattattgcaaacgacgtagatagtaattttgttgtggctatgaggcatctgtcattggctggactcttatccgatcataagtcgaacgtggaaggtatcaactttattatcaagtcatcttatgtttttaagagatatctatctatttacggttttggggtgacattcaaagatctgagaccaaattcgacgttcactaataaattggaggccatcaacgtagaaaaaatagaacttatcaaagaagcatacgccaaatatctcaaagatgtaagagacgggaaaatagttccattatctaaagctttagaagcggactacgtggaatccatgttatccaacttgacaaattttaatatcagagagatagaagaacatatgagacaaacgctgatagatgatccagataataacctcctgaaaatggccaaagcgggttataaagtaaatcctacagaactaatgtatattctaggtacgtatggacaacagaggattgatggtgaaccagcagagactcgagtattgggtagagttttaccttactatcttccagactctaaggatccagaaggaagaggttatattcttaattctttaacaaaaggattaacaggttctcaatattacttttcgatgctggttgcaagatctcaatctactgatatcgtctgtgaaacatcacgtaccggaacactggctagaaaaatcattaaaaagatggaggatatggtggtcgacggatacggacaagtagttataggtaatacgctcatcaagtacgccgccaattataccaaaattctaggctcagtatgtaaacctgtagatcttatctatccagatgagtccatgacttggtatttggaaattagtgctctgtggaataaaataaaacagggattcgtttactctcagaaacagaaacttgcaaaaaagacattggcgccgtttaatttcctagtattcgtcaaacccaccactgaggataatgctattaaggttaaggatctgtacgatatgattcataacgtcattgatgatgtgaaagagaaatacttctttacggtatctaatatagattttatggagtatatattcttgacgcatcttaatccttctagaattagaattacaaaagaaacggctatcactatctttgaaaagttctatgaaaaactcaattatactctaggtggtggaactcctattggaattatttctgcacaggtattgtctgagaagtttacacaacaagccctgtccagttttcacactactgaaaaaagtggtgccgtcaaacaaaaacttggtttcaacgagtttaataacttgactaatttgagtaagaataagaccgaaattatcactctggtatccgatgatatctctaaacttcaatctgttaagattaatttcgaatttgtatgtttgggagaattaaatccaaacatcactcttcgaaaagaaacagataaatatgtagtagatataatagttaatagattatacatcaagagagcagaaataaccgaattagtcgtcgaatatatgattgaacgatttatctcctttagcgtcattgtaaaggaatggggtatggagacattcattgaggacgaggataatattagatttactgtctatctaaatttcgttgaaccagaggaattgaatcttagtaagtttatgatggttcttccgggggcagccaacaagggaaagattagtaaattcaagattcctatctctgactatacgggatatgacgacttcaatcaaacaaaaaagctcaataagatgactgtagaactcatgaatctaaaagaattgggttctttcgatttggagaacgtcaacgtgtatcctggagtatggaatacatacgatatcttcggtatcgaggccgctcgtgaatacttgtgcgaagccatgttaaacacctatggagaagggttcgattatctgtatcagccttgtgatcttctcgctagtttactatgtgctagttacgaaccagaatcagttaataaattcaagttcggtgcagctagtactcttaagagagctacgttcggagacaataaagcattgttaaacgcggctcttcataaaaagtcagaacctattaacgataatagtagctgccacttttttagcaaggtccctaatataggaactggatattacaaatactttatcgacttgggtcttctcatgagaatggaaaggaaactatctgataagatatcttctcaaaagatcaaggaaatggaagaaacagaagacttttaattcttatcaataacatatttttctatgatctgtcttttaaacgatggattttccacaaatgcgcctctcaagtccctcatagaatgatacacgtataaaaaatatagcataggcaatgactccttatttttagacattagatatgccaaaatcatagccccgcttctatttactcccgcagcacaatgaaccaacacgggctcgtttcgttgatcacatttagataaaaaggcggttacgtcgtcaaaatatttactaatatcggtagttgtatcatctaccaacggtatatgaataatattaatattagagttaggtaatgtatatttatccatcgtcaaatttaaaacatatttgaacttaacttcagatgatggtgcatccatagcatttttataatttcccaaatacacattattggttactcttgtcattatagtgggagatttggctttgtgcatatctccagttgaacgtagtagtaagtatttatacaaacttttcttatccatttataacgtacaaatggataaaactactttatcagtaaacgcatgtaatttagaatacgttagagaaaaggctatagtaggcgtacaagcagccaaaacatcaacacttatattctttgttattatattggcaattagtgcgctattactctggtttcagacgtctgataatccagtctttaatgaattaacgagatatatgcgaattaaaaatacggttaacgattggaaatcattaacggatagcaaaacaaaattagaaagtgatagaggtagacttctagccgctggtaaggatgatatattcgaattcaaatgtgtggatttcggcgcctattttatagctatgcgattggataagaaaacatatctgccgcaagctattaggcgaggtactggagacgcgtggatggttaaaaaggcggcaaaggtcgatccatctgctcaacaattttgtcagtatttgataaaacacaagtctaataatgttattacttgtggtaatgagatgttaaatgaattaggttatagcggttattttatgtcaccgcattggtgttccgattttagtaatatggaatagtgttagataaatgcggtaacgaatgttcctgtaaggaaccataacagcttagatttaacgttaaagatgagcataaacataataaacaaaattacaatcaaacctataacattaatatcaaacaatccaaaaaatgaaatcagtggagtagtaaacgcgtacataactcctggataacgtttagtagctgccgttcctattctagaccaaaaatttggtttcatgttttcaaagcggtgttctgcaacaagtcggggatcgtgttctacatatttggcggcattatccagtatctgcctattgatcttcatttcgttttcaattctggctatttcaaaataaaatcccgatgatagacctccagactttataatttcatctacgatgttcagcgccgtagtaactctaataatataggctgataagctaacatcataccctcctgtatatgtgaatatggcatgatttttgtccattacaagctcggttttaactttattgcctgtaataatttctctcatctgtaggatatctatttttttgtcatgcattgccttcaagacgggacgaagaaacgtaatatcctcaataacgttatcgttttctacaataactacatattctacctttttattttctaactcggtaaaaaaattagaatcccatagggctaaatgtctagcgatatttcttttcgtttcctctgtacacatagtgttacaaaaccctgaaaagaagtgagtatacttgtcatcatttctaatgtttcctccagtccactgtataaacgcataatccttgtaatgatctggatcatccttgactaccacaacatctcttttttctggcataacttcgttgtccttcacatcatcgaacttctgatcattaatatgctcatgaacattaggaaatgtttctgatggaggtctatcaataactggcacaacaataacaggagttttcgccgccgccatttagttattgaaattaatcatatacaactctctaatacgagttatattttcgtctatccattgtttcacatttacatatttcgacaaaaagatataaaatgcgtattccaatgcttctctgtttaatgaattactaaaatatacaaacacgtcactgtctggcaataaatgatatcttagaatattgtaacaatttattttgtattgcacatgttcgtgatctatgagttcttcttcgaatggcataggatctccgaatctgaaaacgtataaataggagttagaataataatatttgagagtattggtaatatataaactctttagcggtataattagtttttttctctcgatttctatttttagatgtgatggaaaaatgactaattttgtagcattagtatcatgaactctaatcaaaatcttaatatcttcgtcacacgttagctctttgaagtttttaagagatgcatcagttggttctacagatggagtaggtgcaacaattttttgttctacacatgtatgtactggagccattgttttaactataatggtgcttgtatcgaaaaactttaatgcagatagcggaagctcttcgccgcgactttctacatcgtaattgggttctaacgccgatctctgaatggatactagttttctaagttctaatgtgattctctgaaaatgtaaatccaattcctccggcattatagatgtgtatacatcggtaaataaaactatagtatccaacgatcccttctcgcaaattctagtcttaaccaagaaatcgtatataaccacggagatggcgtatttaagagtggattcttctaccgttttgttcttggatgtcatataggaaactataaagtccgcactactgttaagaatgattactaacgcaactatatagttcaaattaagcattttggaaacataaaataactctgtagacgatacttgactttcgaataagtttgcagacaaacgaagaaagaacagacctctcttaatttcagaagaaaactttttttcgtattcctgacgtctagagtttatatcaataagaaagttaagaattagtcggttaatgttgtatttcattacccaagtttgagatttcataatattatcaaaagacatgataatattaaagataaagcgctgactatgaacgaaatagctatatggttcgctcaagaatatagtcttgttaaacgtggaaacgataactgtatttttaatcacgtcagcggcatctaaattaaatataggtatatttattccacacactctacaatatgccacaccatcttcataataaataaattcgttagcaaaattattaattttagtgaaatagttagcgtcaactttcatagcttccttcaatctaatttgatgctcacacggtgcgaattccactctaacatcccttttccatgcctcaggttcatcgatctctataatatctagttttttgcgtttcacaaacacaggctcgtctctcgcgatgagatctgtatagtaactatgtaaatgataactagatagaaagatgtagctatatagatgacgatcctttaagagaggtataataactttaccccaatcagatagactgttgttatggtcttcggaaaaagaatttttataaatttttccagtattttccaaatatacgtacttaacatctaaaaaatccttaatgataataggaatggataatccgtctattttataaagaaatacatatcgcacattatacttttttttggaaatgggaataccgatgtgtctacataaatatgcaaagtctaaatattttttagagaatcttagttggtccaaattcttttccaagtacggtaatagatttttcatattgaacggtatcttcttaatctctggttctagttccgcattaaatgatgaaactaagtcactatttttataactaacgattacatcacctctaacatcatcatttaccagaatactgatcttcttttgtcgtaaatacatgtctaatgtgttaaaaaaaagatcatacaagttatacgtcatttcatctgtggtattcttgtcattgaaggataaactcgtactaatctcttctttaacagcctgttcaaatttatatcctatatacgaaaaaatagcaaccagtgtttgatcatccgcgtcaatattctgttctatcgtagtgtataacaatcgtatatcttcttctgtgatagtcgatacgttataaaggttgataacgaaaatatttttatttcgtgaaataaagtcatcgtaggattttggacttatattcgcgtctagtagatatgcttttatttttggaatgatctcaattagaatagtctctttagagtccatttaaagttacaaacaactaggaaattggtttatgatgtataatttttttagtttttatagattctttattctatacttaaaaaatgaaaataaatacaaaggttcttgagggttgtgttaaattgaaagcgagaaataatcataaattatttcattatcgcgatatccgttaagtttgtatcgtaatggcgtggtcaattacaaataaagcggatactagtagcttcacaaagatggctgaaatcagagctcatctaaaaaatagcgctgaaaataaagataaaaacgaggatattttcccggaagatgtaataattccatctactaagcccaaaaccaaacgagccactactcctcgtaaaccagcggctactaaaagatcaaccaaaaaggataaagaaaaggaggaagtggaagaagaagtagttatagaggaatatcatcaaacaactgaaaaaaattctccacctccgttatcatctcctggagtcggcgacattgtagaaagcgtggctgctgtagagctcgatgatagcgacggggatgatgaacctatggtacaagttgaagctggtaaagtaaatcatagtgctagaagcgatctttctgacctaaaggtggctaccgacaatatcgttaaagatcttaagaaaattattactagaatctctgcagtatcgacggttctagaggatgttcaagcagctggtatctctagacaatttacttctataactaaagctattacaacactatctgatctagtcaccgagggaaaatctaaagttgttcgtaaaaaagttaaaacttgtaagaagtaaatgcgtgcacttttttataaagatggtaaactctttaccgataataattttttaaatcctgtatcagatgataatccagcgtatgaggttttgcaacatgttaaaattcctactcatttaacagatgtagtagtatatgaacaaacgtgggaagaggcattaactagattaatttttgtgggaagcgattcaaaaggacgtagacaatacttttacggaaaaatgcatgtacaaaatcgcaacgctaaaagagatcgtatttttgttagagtatataacgttatgaaacgaattaattgttttataaacaaaaatataaagaaatcgtccacagattccaattatcagttggcggtttttatgttaatggaaactatgttttttattagatttggtaaaatgaaatatcttaaggagaatgaaacagtagggttattaacactaaaaaataaacacatagaaataagtcccgatgaaatagttatcaagtttgtaggaaaggacaaagtttcacatgaatttgttgttcataagtctaatagactatataagccgctattgaaactgacggatgattctagtcccgaagaatttctgttcaacaaactaagtgaacgaaaggtatatgaatgtatcaaacagtttggtattagaatcaaggatctccgaacgtatggagtcaattatacgtttttatataatttttggacaaatgtaaagtccatatctcctcttccgtcaccaaaaaagttaatagcattaactatcaaacaaactgctgaagttgtaggtcatactccatcaatttcaaaaagagcttatatggcaacgactattttagaaatggtaaaggataaaaattttttagatgtagtatctaaaactacgttcgatgaattcctatctatagtcgtagatcacgttaaatcatctacggatggatgatatagatctttacacaaataattacaagaccgataaatggaaatggataagcgtataaaatctctcgcaatgaccgctttctttggggagctaagcacattggatattatggcattgataatgtctatatttaaacgccatccaaacaataccattttttcagtggataaggatggtcagtttatgattgatttcgaatacgataattataaggcttctcaatatttggatctgaccctcactccgatatttggagatgaatgcaagactcacgcatcgagtatagccgaacaattggcgtgtgcggatattattaaagaggatattagcgaatacatcaaaactactccccgtcttaaacgatttataaaaaaataccgcaatagatcagatactcgcatcagtcgagatacagaaaagcttaaaatagctctagctaaaggcatagattacgaatatataaaagacgcttgttaataagtaaatgaaaaaaaactagtcgtttataataaaacacaatatggatgccaacatagtatcatcttctactattgcaacgtatatagacgctttagcgaagaatgcttcagaattagaacagaggtctaccgcatacgaaataaataatgaattggaactagtatttattaagccgccattaattactttgacaaatgtagtgaatatctctacgattcaggaatcgtttattcgatttaccgttactaataaggaaggtgttaaaattagaactaagattccattatctaaggtacatggtctagatgtaaaaaatgtacagttagtagatgctatagataacatagtttgggaaaagaaatcattagtgacggaaaatcgtcttcacaaagaatgcttgttgagactatcgacagaggaacgtcatatatttttggattacaaaaaatatggatcctctatccgactagaattagtcaatcttattcaagcaaaaacaaaaaactttacgatagactttaagctaaaatattttctaggatccggtgcccagtctaaaagttctttattacacgctattaatcatccaaagtcaaggcctaatacatctctggaaatagaattcacacctagagacaatgaaaaagttccatatgatgaactaataaaggaattgacgactctatcacgtcatatatttatggcttctccagagaatgtaattctttctccgcctattaacgcgcctataaaaacctttatgttgcctaaacaagatatagtaggtttggatctggaaaatctatatgccgtaactaagactgacggcattcctataactatcagagttacatcaaacgggttgtattgttattttacacatcttggttatattattagatatcctgttaagagaataatagattccgaagtagtagtctttggtgaggcagttaaggataagaactggaccgtatatctcattaagctaatagagcctgtgaatgcaatcaatgatagactagaagaaagtaagtatgttgaatctaaactagtggatatttgtgatcggatagtattcaagtcaaagaaatatgaaggtccgtttactacaactagtgaagtcgtcgatatgttatctacatatttaccaaagcaaccagaaggtgttattttgttctattcaaagggacctaaatctaacattgattttaaaattaaaaaggaaaatactatagaccaaactgcaaatgtagtatttaggtacatgtccagtgaaccaattatctttggagaatcgtctatctttgtagagtataagaaatttagcaacgataaaggctttcctaaagaatatggttctggtaagattgtgttatataacggcgttaattatctaaataatatctattgtttggaatatattaatacacataatgaagtgggtattaagtccgtggttgtacctattaagtttatagcagaattcttagttaatggagaaatacttaaacctagaattgataaaaccatgaaatatattaactcagaagattattatggaaatcaacataatatcatagtcgaacatttaagagatcaaagcatcaaaataggagatatctttaacgaggataaactatcggatgtgggacatcaatacgccaataatgataaatttagattaaatccagaagttagttattttacgaataaacgaactagaggaccgttgggaattttatcaaactacgtcaagactcttcttatttctatgtattgttccaaaacatttttagacgattccaacaaacgaaaggtattggcgattgattttggaaacggtgctgacctggaaaaatacttttatggagagattgcgttattggtagcgacggatccggatgctgatgctatagctagaggaaatgaaagatacaacaaattaaactctggaattaaaaccaagtactacaaatttgactacattcaggaaactattcgatccgatacatttgtctctagtgtcagagaagtattctattttggaaagtttaatatcatcgactggcagtttgctatccattattcttttcatccgagacattatgctaccgtcatgaataacttatccgaactaactgcttctggaggcaaggtattaatcactaccatggacggagacaaattatcaaaattaacagataaaaagacttttataattcataagaatttacctagtagcgaaaactatatgtctgtagaaaaaatagctgatgatagaatagtggtatataatccatcaacaatgtctactccaatgactgaatacattatcaaaaagaacgatatagtcagagtgtttaacgaatacggatttgttcttgtagataacgttgatttcgctacaattatagaacgaagtaaaaagtttattaatggcgcatctacaatggaagatagaccgtctacaaaaaactttttcgaactaaatagaggagccattaaatgtgaaggtttagatgtcgaagacttacttagttactatgttgtttatgtcttttctaagcggtaaataataatatggtatgggttctgatatccccgttctaaatgcattaaataattccaatagagcgatttttgttcctataggaccttccaactgtggatactctgtattgttaatagatatattaatacttttgtcgggtaacagaggttctacgtcttctaaaaataaaagtttgataacatctggcctgttcataaataaaaacttggcgattctatatatactcttattatcaaatctagccattgtcttatagatgtgagctactgtaggtgtaccatttgattttctttctaatactatatatttctctcgaagaagttcttgcacatcatctgggaataaaatactactgttgagtaaatcagttattttttttatatcgatattgatggacatttttatagttaaggataataagtatcccaaagtcgataacgacgataacgaagtatttatacttttaggaaatcacaatgactttatcagattaaaattaacaaaattaaaggagcatgtatttttttctgaatatattgtgactccagatacatatggatctttatgcgtcgaattaaatgggtctagttttcagcacggtggtagatatatagaggtggaggaatttatagatgctggaagacaagttagatggtgttctatatccaatcatatatctaaagatatacccgaagatatgcacactgataaatttgtcatttatgatatatacacttttgacgctttcaagaataaacgattggtattcgtacaggtacctccgtcgttaggagatgatagtcatttgactaacccgttattgtcaccgtattatcgtaatttagtagccagacaaatggtcaataatatgatttttaatcaagattcatttttaaaatatttattagaacatctgattagaagccactatagagtttctaaacatataacaatagttagatacaaggataccaaagaattaaatctaacgagaatatgttataatagagataagtttaaggcgtttgtattcgcttggtttaacggcgtttcggaaaatgaaaaggtactagatacgtataaaaaggtatctaatttgatataatgaatttggtgactgtatcacacgcaccatatactattacttatcataatgattgggaaccagttatgagtcaattggtagagttttataacgaagtagccagttggctgctacgagacgagacgtcgcctattcctgataagttctttatacagttgaaacaaccgcttagaaataaacgagtatgtgtgtgcggtatagatccgtatccgaaagatggaactggtgtaccgttcgaatcaccaaattttacaaaaaaatcaattaaggagatagcttcatctatatctagattaaccggagtaattgattataaaggttataaccttaatataatagacggggttataccctggaattattacttaagttgtaaattaggagaaacaaaaagtcacgcgatttactgggataaaatttctaagttactgctgcagcatataactaaacacgttagtgttctttattgtttgggtaaaacagatttctcgaatatacgggccaagttagaatccccggtaactaccatagtcggatatcatccagcggctagagaccgccaattcgagaaagatagatcatttgaaattatcaacgttttactggaattagacaacaaggcacctataaattgggctcaagggtttatttattaatgctttagtgaaattttaacttgtgttctaaatggatgcaactattagaggtaatgatgttatctttgtccttaagactataggtgtcccatcagcatgtagacaaaatgaagatccaagattcgtagaagcatttaaatgcgacgagttagaaagatatattgataataatccagaatgttcactatttgaaagtcttagggatgaggaagcatattctatagtcagaattttcatggatgtagatttagacgcgtatctagacgaaatagattatttaacggccattcaagattttattatcgaggtgtcaaactgtgtagctagattcgcgtttacagaatgcggcgccattcatgaaaatgtaataaaatccatgagatctaatttttcattgactaagtctacaaatagagataaaacaagttttcatattatctttttagatacgtataccactatggatacattgatagctatgaaacgaacactattagaattaagtagatcatctgaaaatccactaacaagatcgatagacactgccgtatataggagaaaaacaactcttcgggttgtaggtactaggaaaaatccaaattgcgacactattcatgtaatgcaaccacctcatgataatatagaagattacctattcacttacgtggatatgaacaacaatagttattacttttctctacaacaacgattggaggatttagttcctgataagttatgggaaccagggtttatttcattcgaagacgctataaaaagagtttcaaaaatattcattaattctataataaactttaatgatctcgatgaaaataattttacaacggtaccactggtcatagattacgtaacaccttgtgcattatgtaaaaaacgatcgcataaacatccgcatcaactatcgttggaaaatggtgctattagaatttacaaaactggtaatccacatagttgtaaagttaaaattgttccgttggatggtaataaactgtttaatattgcacaaagaattttagacactaactctgttttattaaccgaacgaggagaccatatagtttggattaataattcatggaaatttaacagcgaagaacccttgataacaaaactaattttgtcaataagacatcaactacctaaggaatattcaagcgaattactctgtccaagaaaacgaaagactgtagaagctaacatacgagacatgttagtagattcagtggagaccgatacctatccggataaacttccgtttaaaaatggtgtattggacctggtagacggaatgttttactctggagataatgctaaaaaatatacgtgtactgtatcaaccggatttaaatttgacgatacaaagttcgtcgaagacagtccagaaatggaagagttaatgaatatcattaacgatatccaaccattaacggatgaaaataagaaaaatagagagctatatgaaaaaacattatctagttgtttatgtggtgctaccaaaggatgtttaacattcttttttggagaaactgcaactggaaagtcgacaaccaaacgtttgttaaagtctgctatcggtgacctgtttgttgagacgggtcaaacaattttaacagatgtattggataaaggacctaatccatttatcgctaacatgcatttgaaaagatctgtattctgtagcgaactacctgattttgcctgtagtggatcaaagaaaattagatctgacaatattaaaaagttgacagaaccttgtgtcattggaagaccgtgtttctccaataaaattaataatagaaaccatgcgacaatcattatcgatactaattacaaacctgtttttgataggatagataacgcattaatgagaagaattgccgtcgtgcgattcagaacacacttttctcaaccttctggtagagaggctgctgaaaataatgacgcgtacgataaagtcaaactattagacgaggggttagatggtaaaatacaaaataatagatatagatttgcatttctatacttgttggtgaaatggtacagaaaatatcatgttcctattatgaaactatatcctacacccgaagagattcctgactttgcattctatctcaaaataggtactctgttagtatctagctctgtaaagcatattccattaatgacggacctctccaaaaagggatatatattgtacgataatgtggttactcttccgttgactactttccaacagaaaatatccaagtattttaattctagactatttggacacgatatagagagcttcatcaatagacataagaaatttgccaatgttagtgatgaatatctgcaatatatattcatagaggatatttcatctccgtaaatatatgctcatatatttatagaagatatcacatatctaaatgaataccggaattatagatttatttgataatcatgttgatagtataccaactatattacctcatcagttagctactctagattatctagttagaactatcatagatgagaacagaagcgtgttattgttccatattatgggatcaggtaaaacaataatcgctttgttgttcgccttggtagcttccagatttaaaaaggtttacattctagtgcctaatatcaacattttgaaaatttttaattataatatgggtgtagctatgaacttgtttaatgacaaattcatagctgagaatatctttattcattccacaacaagtttttattctcttaattataacgataacgtcattaattataacggattatctcgctacaataactctatttttatcgttgatgaggcacataatatctttgggaataatactggagaacttatgaccgtgataaaaaataaaaacaagattccttttttactattgtctggatctcccattactaacacacctaatactctgggtcatattatagatttaatgtccgaagagacgatagattttggtgaaattattagtcgtggtaagaaagtaattcaaacacttcttaacgaacgaggtgtgaatgtacttaaggatttgcttaaaggaagaatatcatattacgaaatgcctgataaagatctaccaacgataagatatcacggacgtaagtttctagatactagagtagtatattgtcacatgtctaaacttcaagagagagattatatgattactagacgacagctatgttatcatgaaatgtttgataaaaatatgtataacgtgtcaatggcagtattgggacaacttaatctgatgaataatttagatactttatttcaggaacaggataaggaattgtacccaaatctgaaaataaataatggcgtgttatacggagaagaattggtaacgttaaacattagttccaaatttaaatactttatcaatcggatacagacactcaacggaaaacattttatatacttttctaattctacatatggcggattggtaattaaatatatcatgctcagtaatggatattctgaatataatggttctcagggaactaatccacatatgataaacggcaaaccaaaaacatttgctatcgttactagtaaaatgaaatcgtctttagaggatctattagatgtgtataattctcctgaaaacgatgatggtagtcaattgatgtttttgttttcatcaaacattatgtccgaatcctatactctaaaagaggtaaggcatatttggtttatgactatcccagatactttttctcaatacaaccaaattcttggacgatctattagaaaattctcttacgccgatatttctgaatccgttaatgtatatcttttagccgccgtatattccgatttcaatgacgaagtgatgtcattaaacgattacacacaggatgaattgattaatgttttaccatttgacatcaaaaagctgttgtatctaaaatttaagactaaagaaacgaatagaatatactctattcttcaagagatgtctgaaacgtattctcttccaccacatccatcaattgtaaaagttttattgggagaattggtcagacaatttttttataataattctcgtattaagtataacgataccaagttacttaaaatggttacatcagttataaaaaataaagaagacgctaggaattacatagatgatattgtaaacggtcacttctttgtatcgaataaagtatttgataaatctcttttatacaaatacgaaaacgatattattacagtaccgtttagactttcctacgaaccatttgtttggggagttaactttcgtaaagaatataacgtggtatcttctccataaaactgatgagatatataaagaaataaatgtcgagctttgttaccaatggataccttccagttacattggaaccacacgagctgacgttagacataaaaactaatattaggaatgccgtatataagacgtatctccatagagaaattagtggtaaaatggccaagaaaatagaaattcgtgaagacgtggaattacctctcggcgaaatagttaataattctgtagttataaacgttccgtgtgtaataacctacgcgtattatcacgttggggatatagtcagaggaacattaaacatcgaagatgaatcaaatgtaactattcaatgtggagatttaatctgtaaactaagtagagattcgggtactgtatcatttagcgattcaaagtactgcttttttcgaaatggtaatgcgtatgacaatggcagcgaagtcactgccgttctaatggaggctcaacaaggtatcgaatctagttttgtttttctcgcgaatatcgtcgactcataaaaaagagaatagcggtaagtataaacacgaatactatggcaataattgcgaatgttttattcccttcgatatatttttgataatatgaaaaacatgtctctctcaaatcggacaaccatctcataaaatagttctcgcgcgctggagaggtagttgctgctcgtataatctccccagaataatatacttctgtgtcatcgttcaatttatacggatttctatagttctctgttatatgatgcggtttgccctcatgattagacaacgacaatagtgttctgaatttagatagttgatcagaatgaatgtttattggcgttggaaaaattatccatacagcgtctgcagagtggttgatagttgttcctagatatgtaaaataatccaacttactaggcagcaaattgtctagataaaatactgaatcaaacggtgcagacgtattggcggatctaatggaatccaattgattgactatcttttgaaaatatacatttttatgatccaatacttgtaaaaatatagaaataatgataagtccatcatcgtgtttttttgcctcttcataagaactatattttttcttattccaatgaacaagattaatctctccagagtatttgtacacatctatcaagtgattggatccataatcgtcttcctttccccaatatatatgtagtgatgataacacatattcattggggagaaaccctccacttatatatcctcctttaaaattaatccttactagttttccagtgttctggatagtggttggtttcgactcattataatgtatgtctaacggcttcaatcgcgcgttagaaattgcttttttagtttctatattaataggagatagttgttgcggcatagtaaaaatgaaatgataactgtttaaaaatagctcttagtatgggaattacaatggatgaggaagtgatatttgaaactcctagagaattaatatctattaaacgaataaaagatattccaagatcaaaagacacgcatgtgtttgctgcgtgtataacaagtgacggatatccgttaataggagctagaagaacttcattcgcgttccaggcgatattatctcaacaaaattcagattctatctttagagtatccactaaactattacggtttatgtactacaatgaactaagagaaatctttagacggttgagaaaaggttctatcaacaatatcgatcctcactttgaagagttaatattattgggtggtaaactagataaaaaggaatctattaaagattgtttaagaagagaattaaaagaggaaagtgatgaacgtataacagtaaaagaatttggaaatgtaattctaaaacttacaacacgggataaattatttaataaagtatatataggttattgcatggcgtgttttattaatcaatcgttgaaggatttatcgcatactagtatttacaatgtagaaattagaaagattaaatcattaaatgattgtattaacgacgataaatacgaatatctgtcttatatttataatatgctagttaatagtaaatgaacttttacagatctagtataattagtcagattattaagtataatagacgactagctaagtctattatttgcgaggatgactctcaaattattacactcacggcattcgttaaccaatgcctatggtgtcataaacgagtatccgtgtccgctattttattaactactgataacaaaatattagtatgtaacagacgagatagttttctctattctgaaataattagaactagaaacatgtctagaaagaaacgattatttctgaattattccaattatttgaacaaacaggaaagaagtatactatcgtcatttttttctctagatccagctactactgataatgatagaatagatgctatttatccgggtggcatacccaaaaggggtgagaatgttccagagtgtttatccagggaaattaaagaagaagttaatatagacaattcttttgtattcatagacactcggttttttattcatggcatcatagaagataccattattaataaattttttgaggtaatcttctttgtcggaagaatatctctaacgagtgatcaaatcattgatacatttaaaagtaatcatgaaatcaaggatctaatatttttagatccgaattcaggtaatggactccaatacgaaattgcaaaatatgctctagatactgcaaaactcaaatgttatggccatagaggatgttattacgaatcattaaaaaaattaactgaggatgattgattagaaaatataaattaatttaccatcgtgtatttttataacgggattgtccggcatatcatgtagatagttaccgtctacatcgtatactcgaccatctacgcctttaaatcctctatttattgacattaatctattagaattggaataccaaatattagtaccctcaattagtttattggtaatattttttttagacgatagatcgatggctcttgaaaccaaggttttccaaccggactcattgtcgatcggtgagaagtctttttcattagcatgaatccattctaatgatgtatgtttaaacactctaaacaattggacaaattcttttgatttgctttgaatgatttcaaataggtcttcgtctacagtaggcataccattagataatctagccattataaagtgcacgtttacatatctacgttctggaggagtaagaacgtgactattgagacgaatggctcttcctactatctgacgaagagacgcctcgttccatgtcatatctaaaatgaagatatcattaattgagaaaaaactaataccctcgcctccactagaagagaatacgcatgttttaatgcattctccgttagtgtttgattcttggttaaactcagccaccgccttgattctagtatcttttgttctagatgagaactctatattagagataccaaagactttgaaatatagtaataagatttctattcctgactgattaacaaatggttcaaagactagacatttaccatgggatgctaatattcccaaacatacatctataaatttgacgcttttctcttttaattcagtaaatagagagatatcagccgcactagcatcccctttcaatagttctccctttttaaaggtatctaatgcggatttagaaaactctctatctcttaatgaatttttaaaatcattatatagtgttgctatctcttgcgcgtattcgcccggatcacgattttgtctttcaggaaagctatcgaacgtaaacgtagtagccatacgtctcagaattctaaatgatgatatacctgtttttatttcagcgagtttagccttttgataaatttcttcttgctttttcgacatattaacgtatcgcattaatactgttttcttagcgaatgatgcagacccttctacgtcatcaaaaatagaaaactcgttattaactatgtacgaacataggcctcctagtttggagactaattctttctcatcaactagacgtttattctcaaatagcgattggtgttgtaaggatcctggtcgtagtaagttaaccaacatggtgaattcttgcacactattgacgataggtgtagctgataaacaaatcatcttatggttttttaacgcaatggtcttagataaaaaattatatactgaacgagtaggacggatcttaccatcttctttgattaatgatttagaaatgaagttatgacattcatcaataatgacgcatattctactcttggaattaatagttttgatattagtaaaaaatttatttctaaaattttgatcatcgtaattaataaaaatacaatccttcgttatctctggagcgtatctgagtatagtgttcatccaaggatcttctatcaaagcctttttcaccaataagataatagcccaattcgtataaatatccttaagatgtttgagaatatatacagtagtcattgttttaccgacacccgtttcatggaacaataaaagagaatgcatactgtctaatcctaagaaaactcttgctacaaaatgttgataatccttgaggcgtactacgtctgttcccatcatttcaacaggcatattagtagttctgcgcaatgcataatcgatataggccgcgtgtgatttactcatttatgagtgataagtaataactatgttttaaaaatcacagcagtagtttaactagtcttctctgatgtttgttttcgatactttttgaatcagaagtcatactagaataaagcaacgagtgaacgtaatagagagcttcgtatactctattcgaaaactctaagaacttattaatgaattccgtatccactggattgtttaaaatactaaattgaacactgttcacatccttccaagaagaagacttagtgacggacttaacatgagacataaataaatccaaattttttttacaaacatcactagccaccataatggcgctatctttcaaccagctatcgcttacgcattttagcagtctaacatttttaaagagactacaatatattctcatagtatcgattacacctctaccgaataaagttggaagtttaataatacaatatttttcgtttacaaaatcaaataatggtcgaaacacgtcgaaggttaacatcttataatcgctaatgtatagattgttttcagtgagatgattattagatttaatagcatctcgttcacgtttgaacagtttattgcgtgcgctgaggtcggcaactacggcgtccgctttagtactcctcccataatactttacgctattaatctttaaaatttcatagactttatctagatcgctttctggtaacatgatatcatgtgtaaaaagttttaacatgtcggtcggcattctatttagatcattaactctagaaatctgaagaaagtaattagctccgtattccagactaggtaatgggcttttacctagagacagattaagttctggcaatgtttcataaaatggaagaaggacatgcgttccctcccggatattttttacaatttcatccatttacaactctatagtttgttttcattattattagttattatctcccataatcttggtaatacttaccccttgatcgtaagataccttatacaggtcattacatacaactaccaattgtttttgtacataatagattggatggttgacatccatggtggaataaactactcgaacagatagtttatctttccccctagatacattagccgtaatagttgtcggcctaaagaatatctttggtgtaaagttaaaagttagggttcttgttccattattgctttttgtcagtagttcattataaattctcgagatgggtccgttctctgaatatagaacatcatttccaaatctaacttctagtctagaaataatatcggtcttattcttaaaatctattcccttgatgaagggatcgttaatgaacaaatccttggcctttgattcggctgatctattatctccgttatagacgttacgttgactagtccaaagacttacaggaatagatgtatcgatgatgttgatactatgtgatatgtgagcaaagactgttctcttagtggcatcactatatgttccagtaatggcggaaaactttttagaaatgttatatataaaagaattttttcgtgttccaaacattagcagattagtatgaagataaacactcatattatcaggaacattatcaatttttacatacacatcagcatcttgaatagaaacgataccatcttctggaacctcaacaatctcggcagactccggataaccagtcggtgggccatcactaacaataactagatcatccaacaatctactcacatatgcatctatataatctttttcatcttgtgagtaccctggatacgaaataaatttattatccgtatttccataataaggtttagtataaacagagagcgatgttgccgcatgaacttcagttacagtcgccgttggttggtttatttgacctattactctcctaggtttctctataaacgatggtttaatttgtacattcttaaccatatatccaataaagctcaattcaggaacataaacaaattctttgttgaacgtttcaaagtcgaacgaagagtcacgaataacgatatcggatactggattgaaggttaccgttacggtaatttttgaatcggatagtttaagactgctgaatgtatcttccacatcaaacggagttttaatataaacgtatactgtagatggttctttaatagtgtcattaggagttaggccaatagaaatatcattaagttcactagaatatccagagtgtttcaaagcaattgtattattgatacaattattatataattcttcgccctcaatttcccaaataacaccgttacacgaagagaccgatacgtaattaatacatttatatccaacatatggtacgtaaccgaatcttcccatacctttaacttctggaagttccaaactcagaaccaaatgattaagcgcagtaatatactgatccctaatttcgaagctagcgatagcctgattgtctggaccatcgtttgtcataactccggatagagaaatatattgcggcatatataaagttggaatttgactatcgactgcgaagacattagaccgtttaatagagtcatccccaccgatcaaagaattaatgatagtattattcattttctatttaaaatggaaaaagcttacaataaactccgtagagaaatatctataatttgtgagttttccttaaagtaacagcttccgtaaacgccgtctttatctcttagtaagtttattgtatttataaccttttccttatcttcatagaatactaaaggcaacaaagaaatttttggttcttctctaagagctacgtgagacttaaccatagacgccaacgaatccctacatattttagaacagaaatacccaacttcaccacccttgaatgtctcaatactaataggtttaaaaaccaaatcttgattacaaaaccaacacttatcaattacactatttgtcttaatagacacatctgccatagatttataatactttggtagtatacaagcgagtgcttcttctttagcgggcttaaaaactgctttaggtgctgaaataaccacatctggaaggcttactcgcttagccatttaattacggaactatttttttatacttctaatgagcaagtagaaaacctctcatctacaaaaacgtactcgtgtccataatcctctaccatagtaacacgttttttagatctcatatgtgctaaaaagttttcccatactaattggttactattatttttcgtataatttttaacagtttgaggttttagatttttagttacagaagtgatatcgaatattttatccaaaaagaatgagtaattaattgtcttagaaggagtgttttcttggcaaaagaataccaagtgcttaaatatttctactacttcattaattttttcggtactcagattcagtttctcatcttttacttgattgattatttcaaaaactaacttataatcctttttatttattctctcgttagccttaagaaaactagatacaaaatttgcatctacatcatccgtggatatttgatttttttccatgatatccaagagttccgagataatttctccagaacattgatgagacaataatctccgcaatacatttctcaaatgaataagtttattagacacgtggaagtttgactttttttgtacctttgtacatttttgaaataccgactcgcaaaaaatacaatattcatatccttgttcagatactataccgttgtgtctacaaccgctacataatcgtagattcatgttaacactctacgtatctcgtcgtccaatattttatataaaaacattttatttctagacgttgccagaaaatcctgtaatatttttagttttttgggctgtgaataaagtatcgccctaatatggttaccgtcctctgccaatatagtagttaaattatccgcacatgcaaaagaacaccgcttaggcggattcagtacaatgttatatttttcgtaccaactcatttaaatatcataatctaaaatagttctgtaatatgtctagcgctaatatattgatcataatcctgtgcataaattaagatacaacaatgtctcgaaatcatcgacatggcttcttccatagttagaagatcgtcgtcaaagttagcaacgtgattcatcaacatttgctgttttgaggcagcaaatactgaaccgtcgccattcaaccattcataaaaaccatcgtctgaatccattgataatttcttgtactggtttttgagagctcgcatcaatctagcatttctagctcccggattgaaaacagaaagaggatcgtacatccagggtccattttctgtaaatagaatcgtataatgtcccttcaagaagatatcagacgatccacaatcaaagaattggtctccgagtttgtaacagacagcggactttaacctatacatgataccgtttagcataatttctggtgatacgtcaatcggagtatcatctattagagatctaaagccggtgtaacattctccaccaaacatattcttattctgacgtcgttctacataaaacatcattgctccattaacgataacaggggaatgaacagcactacccatcacattagttcccaatggatcaatgtgtgtaactccagaacatcttccatatcctatgttaggaggagcgaacaccactcttccactattgccatcgaatgccatagaataaatatccttggaattgatagaaatcggactgtcggatgttgtaatcatcttcataggattaacaactatgtatggtgccgcctgaagtttcatatcgtaactgatgccgtttataggtctagccacagaaaccaacgtaggtctaaatccaactatagacaaaatagaagccaatatctgttcctcatctgtcataacttgagagcatccagtatgaataatcttcattagatggggatctatcgcatcatcatcgttacaataaaaaattcccattctaatgttcataattgcttttctaatcatggtatgcatgtttgctctctgaatctctgtggaaattagatctgatacacctgtaatcactatcggattatcctccgtaagacgattaaccaacaacatataattataagactttactcttctaaattcataaagttgctggattaggctataggtgtctccatgtacatacgcgttctcgagcgcaggaagtttaataccgaatagtgccatcagaataggatgaatatagtaattagtttctggttttctataaataaaagacaaatcttgtgaactagacatatcggtaaaatgcatggattggaatcgtgtagtcgacagaagaatatgatgattagatggagagtatattttatctaactctttaagttggtcaccgattctaggactagctcgagaatgaataagtactaaaggatgagtacatttcacagaaacactagcattgttcaatgtgctctttacatgggtaaggagttgaaatagctcgtttctatttgttctgacaatatttagtttattcataatgttaagcatatcctgaatagtaaagttagatgtgtcatacttgttagtagttagatatttagcaattgcattcccatcatttctcaatctcgtactccaatcatgtgtagatgctacttcatctatagaaaccatacaatcctttttggtagtttgttgagcttgatcatttcctgcacgtttaggtttggtacgttgatttctagcccctgcagatataaagtcatcgtctacaattttggataatgaattgcatacactacaagacaaagatttatcagaagtgtgaatatgatcttcatctaccaaagaaagagtttgattagtataactagattttagtcctgcgttagatgttaaaaaaacatcgctattgaccacggcttccattatttatattcgtagtttttactcgaaagcgtgattttaatatccaatcttattacttttggaatcgttcaaaacctttgactaattgtagaatttgatctattgccctacgcgtatactcccttgcatcatatacgttcgtcaccagatcgtttgtttcggcctgaagttggtgcatatctctttcaacattcgacatgagatccttaagggccatatcgtctagattttgttgagatgttgctcctggatttggattttgttgtgctgttgtacatactgtaccaccagtaggtgtaggagtacatacagtggccacaataggaggttgagaaagtgtaaccgttggagtagtacaagaaatacttccatccgattgttgtgtacatgtagttgttggtaacgtctgagaaggttgggtagatggcggcgtcgtcgttttttgatctttattaaatttagagataatatcctgaacagcattgctcggcgtcaacgctggaaggagtgaactcgccggtgcatcagtatcttcagacagccaatcaaaaagattagacatatcagatgatgtattagtttgttgtcgtggttttggtgtaggaacagtactactaggtagaagaataggagccggtgtagctgttggaaccggctgtggagttatatgaatagttggttgtagcggttggataggctgtctgctggcgaccgtcatattatctctagctagttgttctcgcaactgtctttgataatacgactcttgagactttagtactatttcaatcgcttcatcctttttcgtatccggatcctttttttcagaataatagattgacgactttggtgtagaggattctgccagcccctgtgagaacttgttaaagaagtccatttaaggctttaaaattgaattgcgattataagattaaatggcagacacagacgatattatcgactatgaatccgatgatctcaccgaatacgaggatgatgaagaagaggaagaagatggagagtcactagaaactagtgatatagatcccaaatcttcttataagattgtagaatcagcatccactcatatagaagatgcgcattccaatcttaaacatatagggaatcatatatctgctcttaaacgacgctatactagacgtataagtctatttgaaatagcgggtataatagcagaaagctataacttgcttcaacgaggaagattacctctagtttcagaattttctgacgaaacgatgaagcaaaatatgctacatgtaattatacaagagatagaggagggttcttgtcctatagtcatcgaaaagaacggagaattgttgttggtaaacgattttgacaaagatggtctaaaattccatctagactatattatcaaaatttggaaacttcaaaaacgatattagaatttatacgaatatcgttctctaaatgtcacaatcaagtctctcatattcagcaggttattgtcgtactttatatcgtgttcattaacgatattttgcaaaatagtaatgattctatcttccttcgatagatattcttcagagattattgtcttatattctttcttgttatccgatatgaatttgataagactttgaacattattaatacccgtctgtttaattttttctacagatattttagttttggcagattctattgtgtctgttaatagacatccaacatcgacattcgacgtcaattgtctataaatcagagtataaattttagaaataacattagcaaattgttgtgcgttgatgtcgttattctgaaacagtatgattttaggtagcattttcttaacaaagagaacgtatttattgttactcagttgaacagatgatatatccagattactaacgcatctgattccatataccaaactttcagaagaaatggtgtacaattgtttgtattcattcaatgtctccttttcagaaattagtttagagtcgaatactgcaataattttcaagagatagttttcatcagataagattttatttagtgtagatatgataaaactattgttttgttggagaacttgatacgccgcgttctctgtagtcgacgctctcaaatgggaaacgatctccattatttttttggaatcggatactatatcttcggtatcttgacgcagtctagtatacatagagttaagagagattagagtttgtacattaagcaacatgtctctaaatgtggctacaaacttttcctttttcacataatctagtttattatataccgatttcacaacggcaccagatttaaggaaccagaatgaaaaactctgataactacaatatttcatcatagttacgattttattatcttctatagttggtgtaatagcgcatacctttttttccaagactggaaccaacgtcataaaaatgtttaaatcaaaatccatatcaacatctgatgcgctaagaccagtctcgcgttcaagattatttttactaatggtgacgaactcatcgtatagaactctaagtttgtccattatttatttacagatttagttgtttaatttatttgtgctcttccagagttgggatagtatttttctaacgtcagtattatattattaggatctacgttcatatgtatcataatattaatcatccacgttttgataaatctatctttagcttctgaaataacgtatttaaacaaaggagaaaaatatttagctacggcatcagacgcaataacattttttgtaaatgtaacgtatttagacgacagatcttcgttaaaaagttttccatctatgtagaatccatcagttgttaacaccattcccgcgtcagattgaataggagtttgaatagtttgttttggaaatagatccttcaataacttatagttgggtgggaaaaaatcgattttatcactagactctttcttttttactatcattacctcatgaactatttcttgaatgagtatatgtattttctttcctatatcggacgcgttcattggaaaatataccatgtcgttaactataagaatatttttatcctcgtttacaaactgaataatatcagatgtagttcgtaaacgaactatatcatcaccagcacaacatctaactatatgatatccactagtttcctttagtcgtttattatcttgttccatattagcagtcattccatcatttaagaaggcgtcaaagataatagggagaaatgacattttggattctgttacaactttaccaaaattaaggatatacggacttactatctttttctcaacgtcaatttgatgaacacacgatgaaaatgtacttcgatgagattgatcatgtagaaaacaacaagggatacaatatttccgcatatcatgaaatatattaagaaatcccaccttattatatttccccaaaggatccatgcatgtaaacattatgccgttatcattaataaagacttctttctcatcggatttgtaaaagttgttactgatttttttcattccaggatctagataattaataatgatgggttttctattcttattctttgtattttggcatatcctagaccagtaaacagtttccactttggtaaaatcagcagacttttgaacgctattaaacatggcattaatggcaataactaaaaatgtaaaatatttttctatgttaggaatatggtttttcactttaatagatatatggtttttggccaaaataatagatatttttttatccgaggatagtaaaatattattagtcgccgtctctataaaaataaagctagtctcgatatccaattttattctagaattgataggagtcgccaaatgtaccttatacgttatatctcccttgatgcgttccatttgtgtatctatatcggacacaagatctgtaaatagttttacgttattaatcatcacggtatcgccgtcgctagataacgctaatgtaccatccaagtcccaaatggagagatttaactgttcatcgtttagaataaaatgattaccggtcatattaataaagtgttcatcgtatctagataacaacgacttataattaatgtccaagtcttgaactcgctgaatgatcttttttaacccagttagttttagattggtacgaaatatattgttaaactttgattctacagtaatgtccaaatctagttgtggaaatacttccatcaacattgtttcaaacttgataatattattatctacatcttcgtacgatccaaattccggaatagatgtatcgcacgctctggccacccagataaccaaaaagtcacacgctccaggatatacattgtataaaaagctatcgttttttagtagtgtttttttctgagtatatacgaagggattaaaaatagtattatcaacgtaactatattccaaattattcttatgagaatagataataatatcgtccttaatatctaacaaatttcctaaatatccctttaattgagtcattcgaagcgtcaatagaatatgtctcttaactatttccggctgttgtatatttaaatgacttcgtaaaaaataatatatgggcgacttctcatctatgtaatcatatggagtgagatatagggctcgttctacctcctgccccttacccacctgtaataccaattgcggacttactatatatcgcatatttatatcgtggggtaaagtgaaaatctactaccgatgatgtaagtcttacaatgttcgaaccagtaccagatcttaatttggaggcctccgtagaactaggggaggtaaatatagatcaaacaacacctatgataaaggaaaatagcggttttatatcccgtagtagacgtctatttgcccatagatctaaggatgatgagagaaaactagcactacgattctttttacaaagactttattttttagatcatagagagattcattatttgttcagatgcgttgacgctgtaaaagacgtcactattaccaaaaaaaataacattatcgtggcgccttatatagcacttttaactatcgcatcaaaaggatgcaaacttacagaaacaatgattgaagcattctttccagaactatataatgaacatagtaagaaatttaaattcaactctcaagtatccatcatccaagaaaaactcggataccagtttggaaactatcacgtttatgattttgaaccgtattactctacagtagctctggctattcgagatgaacattcatctggcatttttaatatccgtcaagagagttatctggtaagttcattatctgaaataacatatagattttatctaattaatctaaaatctgatcttgttcaatggagtgctagtacgggcgctgtaattaatcaaatggtaaatactgtattgattacagtgtatgaaaagttacaactggtcatagaaaatgattcacaatttacatgttcattggctgtggaatcagaacttccaataaaattacttaaagatagaaatgaattatttacaaaattcattaacgagttaaaaaagaccagttcattcaagataagcaaacgcgataaggatacgctattaaaatattttacttaggactagagttagaatttatagacgactcatttcgtttatcattattactattattactaccatcattattagtattcttcttgttatcttgttcagaaatatacagcaatgctatgcctaatactaaatacattatcatgcttgcaatggctctaacaacgacgaaccaaaatgaatttggtcgtagcttttgttcacaaaaatacataaagaaatgtctacataaatctatggcgctattggctacttgaaatagcgccagtcctcctacagattttaatatagctgtataacatgacatttattcatcatcaaaagagacagagtcaccatctgtcatatttagattttttttcatgtgttcaaagtatcctctactcatttcattataatagtttatcatacttagaattttaggacggatcaatgagtaagacttaactagatcgtcagtagtaatttgtgcatcgtctattctgcatccgcttcgtcgaataatgtatagcatcgctttgagattctccatagctatcaagtctttatacaatgacatggaaatatctgtgaatactttatacttctccaacatcgatgccttaacatcatcgcctactttagcattgaaaatacgttctattgtgtagatggatgtaacaagatttttaaacaacaatgccattttacacgatgattgtctcaagtctccaatcttttgtttagaacgattagctacagagttcaacgcttggctgactagcatattattatctttagaaattgtattcttcaatgaagcgtttatcatatctgtgatttcgttagtcatattacagtctgactgggttgtaatgttatccaacatatcacctatggatacggtacacgtaccagcatttgtaataatcctatctaagatgttgtatggcattgcgcagaaaatatcttctcctgtaatatctccactctcgataaatctactcagattattcttaaatgccttattctctggagaaaagatatcagtgtccatcatttcattaatagtatacgcagaaaagataccacgagtatcaattctatccaagatacttatcggttccgagtcacagataatggtttcctctccttcgggagatcctgcatagaaatatctaggacaatagtttctatactgtctgtaactctgataatctctaaagtcactaactgataccatgaaattgagaagatcaaacgctgaagtaattaatttttctgcctcgtttttactacaactagttttcatcaatgtagtgacgatgtattgtttagttactcttggtctaatactgatgatagagatattattacttcccataatggatcttctagtagtcaccttaaagcccattgatgcaaatagcagatagataaagtcttggtatgactcctttctaatatagtacggactacctttgtcacccaactttatacccacataagccataacaacctctttaatagccgtttcatgaggtttatcagccatgagcctgagtagttggaagaatctcatgaatcccgtctcagaaagtcctatatgcatgatagatttatctttcctgggaaactctcgtatagtcatagatgaaatactcttcaaagtttctgaaataagattagtaacagtcttacctccgactactctaggtaacaaacaaactctaataggtgttttctctgcggagataatatcagaaaggatagagcaataagtagtattattgtgattataaagaccgaatacataacaggtagaatttataaacatcatgtcctgaaggtttttagacttgtattcctcgtaatccataccgtcccaaaacatggatttggtaactttgatagccgtagatctttgttccttcgccaacaggttaaagaaattaataaagaatttgtggtttctacctatgtctacaaattgcacgtttggaagcgtaactgttacgttcactgcagcattttgaggatttcgagtatgaagtacgatgttattgtttactggtatatctggaaagaattctaccagtctaggaataagagattgatatcgcatagaaatacaaaagttcataatctcatcatcgaagagcattttgttaccattgtaataaatatccactctgtcatatgtataaatgaagtactgttcaaacatgatgagatgtttatatgttggcatagtagtgagatctacgtttggtaatggtaatgtattaagattaactccataatgtctagcagcatctgcgatgttataagcgtcgtcaaagcggggtcgatcttgtattgttatatattgtctaacacctataagattatcaaaatcttgtctgcttaatacaccgttaacaatttttgccttgaattcttttattggtgcattaataacatccttatagaggatgttaaacaaataagtgttatcaaagttaagatctggatatttcttttctgctagaacatccattgagtcggagccatctggtttaatataaccaccgataaatctagctctgtattctgtatccgtcaatctaatattaagaaggtgttgagtgaaaggtggaagatcgtaaaagctgtgagtattaatgataggattagtttccgaactaatgttaattggggtattaataatatctatatttccagcgttaagtgtaacattaaacagttttaattcacttgacgtggtatcaattaaataattaatgcccaatttggatatagcagcctgaagctcatcttgtttagttacggatcctaatgagttattaagcaatatatcgaacggatgaacgaaggttgttttaagttggtcacatactttgtaatctagacatagatgcggaagaacggtagaaactatacgaaataaatattcagagtcctctaattgatcaagagtaactattgacttaataggcatcatttatttagtattaaatgacgaccgtaccagtgacggatatacaaaacgatttaattacagagttttcagaagataattatccatctaacaaaaattatgaaataactcttcgtcaaatgtctattctaactcacgttaacaacgtggtagatagagaacataatgccgccgtagtgtcatctccagaggaaatatcctcacaacttaatgaagatctatttccagatgatgattcaccggccactattatcgaacgagtacaacctcatactactattattgacgatactccacctcctacttttcgtagagagttattaatatcggaacaacgtcaacaacgagaaaaaagatttaatattacagtatcgaaaaatgctgaagcaataatggaatctagatctatgataacttctatgccaacacaaacaccatccttgggagtagtttatgataaagataaaagaattcagatgttagaggatgaagtggttaatcttagaaatcaacgatctaatacaaaatcatctgataatttagataattttaccaaaatactatttggtaagactccgtacaaatcaacagaagttaataagcgtatagctatcgttaattatgcaaatttgaacgggtcccccttatcagttgaggacttggatgtttgttcggaggatgaaatagatagaatctataaaacgattaaacaatatcacgaaagtagaaaacgaaaaattatcgtcactaacgtgattattattgtcataaacattatcgagcaggcattgctaaaactcggatttgaagaaatcaaaggactgagtaccgatatcacttcagaaattatcgatgtggagatcggagatgactgcgatgctgtagcatctaaactaggaatcggtaacagtccggttcttaatattgtattgtttatactcaagatattcgttaaacgaattaaaattatttaatttaatacattcccatatccagacaacaatcgtctggattaatctgttcctgtcgtctcataccggacgacatattaatctttttattagtgggcatctttttagatggtttctttttcccagcattaactgattcgatacctaaaagatcgtgattgatctctccgaccattccacgaacttctaattggccgtctctaacggtaccataaactattttaccagcattagtaacagcttggacaatctgaccatccattgcgttgaatgatgtagttgctgttgttctacgtctaggagcaccagaagtatttttggagcccttggaggctgatgtagaagaagacgaggattttgattttggtttacatgtaatacattttgaactctttgattttgtatcacatgcgccggcagtcacatctgtttgagaattaagattattgttgcctcctttgacggctgcatctccaccgatttgcgctagtagatttttaagctgtggtgtaatcttattaactgtttcgatataatcatcgtaactgcttctaacggctaaattttttttatccgccatttagaagctaaaaatatttttatttatgcagaagatttaactagattatacaatgaactaatatgatccttttccagattatttacaaacttggtatttcttggttctggaggaggcgaatttaaattcggacttggatttggattttgtgggttcttgatcttattatacagcgcatataggatggcgacggtaactgctacgcaaataccgatcaacaaaagaataccaatcatttattgacaataacttcactattgatcaagtatgcaatatatcatcttttcactaaataagtagtaataatgattcaacaatgtcgagatatatggacgataataatttagttcatggaaatatcgctatgattggtatgaatgactccactaactctgtggggcgcgcagtgctttccccacatagaataaattagcattccgactgtgataataataccaagtataaacgccataatactcaatactttccatgtacgagtgggactggtagacttactaaagtcaataaaggcgaagatacacgaaagaatcaaaagaatgattccagcgattagcacgccggaaaaataatttccaatcataagcatcatgtccatttaactaataaaaattttaaatcaccgaatgaacaaagtggaatataaaccatataaaaacaatagtttgtactgcaaaaataatatctatttttgttttcgaagatatggtaaaattaaatagtagtacacagcatgttataactaacagcagcaacggctcgtaattacttatcatttactagacgaaaaggtggtgggatattttcttgctcaaataatacaaatatatcacccatccattttatgcgatgtttatatactctaatctttaatagatctatagacgacgggtttaccaacaatatagattttatcgattcatctaatttaaacccttccttaaacgtgaatgatctattatctggcataacgatgactctacctgatgaatcggacaatgtactgggccatgtagaataaattatcaacgaattatcgtctacgaacatttatatcatttgttttaattttagtacgcgaataaatagatataaaatagaaaataacagatattacaaccaatgttatggccgcgcccaaccaggtaggcagttttattttatcttttactacaggttctcctggatgatgtacgttaccaactgcagacgtagttctagtacaattagacgtaagttccgcttgggaattttttaacgctaaagagttaacgttaatcgtacacccaacgtatttacatctagttctttgaacatcttgattataatataaccattttctatctctagattcgtcagtgcactcatgtaaccaacataccctaggtcctaaatatttatctccggaattagattttggataattcgcgcaccaacaatttctatttcctttatgatcgttacaaaagacgtataatgccgtatccccaaaagtaaaataatcaggacgaataattctaataaactcagaacaatatctcgcatccatatgtttggagcaaatatcggaataagtagacatagccggtttccgttttgcacgtaaccattctaaacaattggggtttccaggatcgtttctacaaaatccagtcatgaaatcatcacaatgttctgtcttgtaattattattaaatatttttggacagtgtttggtatttgtcttagaacaacattttgccacgctatcactatcgcccaggagataatccttttttataaaatgacatcgttgcccggatgctatataatcagtagcgtgttttaaatccttaatatattcaggagttacctcgttctgataatagattaatgatccaggacgaaatttgaaagaactacatggttctccatgaattaatacatattgtttagcaaattcaggaactataaaactactacaatgatctattgacataccatctatcaaacaaaatttgggtttaatttctcctggagacgtttcataataatacatataactttcttcggcaaacttaacagctctattatattcaggataattaaaacctaattccatatatttgtctcgtatatctgctattcctggtgctattttaattctattaagagtaacggctgcccccatttttaataatcgtcagtatttaaactgttaaatgttggtatatcaacatttaccttatttcccgcagtataaggtttgttgcaggtatactgttcaggaatggttacatttatacttcttctatagtcctgtctttcgatgttcatcacatatgcaaagaacagaataaacaaaataatgtaagaaataatattaaatatctgtgaatttgtaaatacattgattgccataataattacagcagctacaatacatacaatagacattcccacagtgttgccattacctccacgatacatttgagttactaagcaataggtaataactaagctagtaagaggcaatagaaaagatgagataaatatcatcaatatagagattagaggagggctatatagagccaagacgaacaaaatcaaaccgagtaacgttctaacatcattatttttgaagattcccaaataatcattcattcctccataatcgttttgcatcatacctccatctttaggcataaacgattgctgctgttcctctgtaaataaatctttatcaagcactccagcacccgcagagaagtcgtcaagcatattgtaatatcttaaataactcatttatatattaaaaaatgtcactattaaagatggagtataatctttatgccgaactaaaaaaaatgacttgtggtcaacccctaagtctttttaacgaagacggggattttgtagaagttgaaccgggatcatcctttaagtttctgatacctaagggattttacgcctctccttccgtaaagacgagtctagtatttgaaacattaacaacgaccgataataaaattactagtatcaatccaacaaatgcgccaaagttatatcctcttcaacgcaaagtcgtatctgaagtagtttctaatatgaggaaaatgatcgaatcaaaacgtcctctatacattactcttcacttggcgtgtggatttggtaagactattaccacgtgttatcttatggctacacacggtagaaaaaccgtcatttgcgtacccaataaaatgttaatacatcaatggaagacacaggtagaggcagtcggattggaacataagatatccatagatggagtaagtagtctattaaaggaactaaagactcaaagtccggatgtattaatagtagtcagtagacatctgacaaacgatgccttttgtaaatatatcaataagcattatgatttgttcatcttggatgaatcacatacgtataatctgatgaacaatacagcagttacaagatttttagcgtattatcctccgatgatgtgttattttttaactgctacacctagaccatctaacagaatttattgtaacagtattattaatattgccaagttatccgatctaaaaaaaactatctatgcagtagatagtttttttgagccatattccacagataatattagacatatgataaaacgattagatggaccatctaataaatatcatatatatactgagaagttattatctgtagacgagcctagaaatcaacttattcttgataccctggtagaagaattcaagtcaggaactattaatcgaattttagttattactaaactacgtgaacatatggtatttttctacaaacgattattagattttttcggatcagaggttgtatttataggagacgcccaaaatagacgtactccagatatggtcaaatcaatcaaggaactaaatagatttatattcgtatccaccttattttattccggtactggtttagatattcctagtttggattcgttgttcatttgctcggcagtaatcaacaatatgcaaatagagcaattactagggagggtatgtcgagaaacagaactattagataggacggtatatgtatttcctaacacatccatcaaagaaataaagtacatgataggaaatttcatgcaacgaattattagtctgtctgtagataaactaggatttaaacaagaaagttatcggaaacatcaagaatccgattccacttctgtatgtacaacatcctccagagaagaacgtgtattaaatagaatatttaactcgcaaaatcgttaagaagtttaagcgacgatccgcatgctgcgcaggccagtgtattacccctcatagtattaatataatccaatgatacttttgtgatgtcggaaatcttaaccaatttagactgacaggcagaacacgtcatgcaatcatcatcgtcatcgataactgtagtcttgggcttctttttgcggctcttcattccggaacgcacattggtgctatccatttaggtagtaaaaaataagtcagaatatgccctatagcacgatcgtgcaaaacctggtatatcgtctctatctttatcacaatatagtgtatcgacatttttattattattgacctcgtttatcttggaacatggaatggaaacatttttgttatcaacggccacttttgccttaattccagatgttgtaaaattataactaaacagtctatcatcgacacaaatgaaattcttgtttagacgtttgtagtttacgtatgcggctcgttcgcgtctcattttttcagatattgcaggtactataatattaaaaataagaatgaaataacataggattaaaaataaagttatcatgacttctagcgctgatttaactaacttaaaagaattacttagtctgtacaaaagtttgagattttcagattctgcggctatagaaaagtataattctttggtagaatggggaacatctacttactggaaaataggcgtgcaaaaggtagctaatgtcgagacgtcaatatctgattattatgatgaggtaaaaaataaaccgtttaatattgatccgggatattacattttcttaccgctatattttggaagcgtctttatttattcgaagggtaaaaatatggtagaacttggatctggaaactcttttcaaataccagataatatgcgaagtgcgtgtaacaaagtattagatagtgataacggaatagactttctgagatttgttttgttaaacaatagatggataatggaagatgctatatcaaaatatcagtctccagttaatatatttaaactagctagtgagtacggattaaacatacccaaatatttagaaattgaaatagaggaagacacattatttgacgacgagttatactctattatagaacgctcttttgatgataaatttccaaaaatatccatatcgtatattaagttgggagaacttaggcggcaagttgtagactttttcaaattctcattcatgtatattgagtccatcaaggtagatcgtataggagataatatttttattcctagcgttataacaaaattaggaaaaaagatattagtaaaagatgtagaccatttaatacgatctaaggttagagaacatacatttgtaaaagtaaaaaagaaaaacacattttccattttatacgactatgatgggaacggaacagaaactagaggagaagtaataaaacgaattatagacactataggacgagactattatgttaacggaaagtatttctctaaggttggtagtgcaggcttaaagcaattgactaataaattagatattaatgagtgcgcaactgtcgatgagttagttgatgagattaataaatccggaactgtaaaacgaaaaataaaaaaccaatcagcatttgatttaagcagagaatgtttgggatatccagaagcggattttataacgttagttaataacatgcggttcaaaatagaaaattgtaaggttgtaaatttcaatattgaaaatactaattgtttaaataacccgagtattgaaactatatatagaaactttaaccagttcgtctcaatctttaatgtcgtcaccgatgtcaaaaaaagattattcgagtgaaataatatgcgcctttgatataggtgcaaaaaatcctgccagaactgttttagaagtcaaggataactccgttagggtattggatatatcaaaattagactggagttctgattgggaaaggcgcatagctaaagatttgtcacaatatgaatacactacagttcttctagaacgtcagcctagaaggtcgccgtatgttaaatttatctattttattaaaggctttttatatcatacatcggctgccaaagttatttgcgtctcgcctgtcatgtctggtaattcatatagagatcgaaaaaagagatcggtcgaagcatttcttgattggatggacacattcggattgcgagactccgttccggatagacgcaaattagacgatgtagcggatagtttcaatttggctatgagatacgtattagataaatggaatactaattatacaccttataataggtgtaaatctagaaattacataaaaaaaatgtaataacgttagtaacgccattatggataatctatttacctttctacatgaaatagaagatagatatgccagaactatttttaactttcatctaataagttgcgatgaaataggagatatatatggtcttatgaaagaacgaatttcctcagaggatatgtttgataatatagtgtataataaagatatacatcatgccattaagaaactagtgtattgcgacatccaacttactaaacacattattaatcagaatacgtatccggtatttaacgattcttcacaagtgaaatgttgtcattatttcgacataaactcagataatagcaatattagctctcgtacagtagagatatttgagagggaaaagtcatctcttgtatcatatattaaaactaccaataagaagagaaaggtcaattacggcgaaataaagaaaactgttcatggaggcactaatgcaaattacttttccggtaaaaagtctgacgagtatctgagtactacagttagatccaacattaatcaaccttggatcaaaaccatctctaagaggatgagagttgatatcattaatcactctatagtaacgcgtggaaaaagctctatattacaaactatagaaattatttttactaatagaacatgtgtgaaaatattcaaggattctactatgcacattattctatccaaggacaaggatgaaaaggggtgtatacacatgattgacaaattattctatgtctattataatttatttctgttgttcgaggatatcatccaaaacgagtactttaaagaagtagctaatgttgtaaaccacgtactcacggctacggcattagatgagaaattattcctaattaagaaaatggctgaacacgatgtttatggagttagcaatttcaaaatagggatgtttaacctgacatttattaagtcgttggatcataccgttttcccctctctgttagatgaggatagcaaaataaagttttttaaggggaaaaagctcaatattgtagcattacgatctctggaggattgtataaattacgtgactaaatccgagaatatgatagaaatgatgaaggaaagatcgactattttaaatagcatagatatagaaacggaatcggtagatcgtctaaaagaattgcttctaaaatgaaaaaaaacactgattcagaaatggatcaacgactagggtataagtttttggtgcctgatcctaaagccggagttttttatagaccgttacatttccaatatgtatcgtattctaattttatattgcatcgattgcatgaaatcttgaccgtcaagcggccactcttatcgtttaagaataatacagaacgaattatgatagaaattagcaatgttaaagtgactcctccagattactcacctataatcgcgagtattaaaggtaagagttatgacgcattagccacgttcactgtaaatatctttaaagaggtaatgaccaaagagggtatatccatcactaaaataagtagttatgagggaaaagattctcatttgataaaaattccgctactaataggatacgggaataaaaatccacttgatacagccaagtatcttgttcctaatgtcataggtggagtctttatcaataaacaatctgtcgaaaaagtaggaattaatctagtagaaaagattacaacatggccaaaatttagggttgttaagccaaactcattcactttctcgttttcctccgtatcccctcctaatgtattaccgacaagatatcgccattacaagatatctctggatatatcacaattggaagcgttgaatatatcatcgacaaagacatttataacggtcaatattgttttgctgtctcaatatttatctagagtgagtctagaattcattagacgtagtttatcatacgatatgcctccagaagttgtctatctagtaaacgcgataatagatagtgctaaacgaattactgaatctattactgactttaatattgatacatacattaatgacctggtggaagctgaacacattaaacaaaaatctcagttaacgatcaacgagttcaaatatgaaatgctgcataactttttacctcatatgaactatacacccgatcaactaaagggattttatatgatatctttactaagaaagtttctctactgtatctaccacacttctagatatccagatagagattcgatggtttgtcatcgcatcctaacgtacggcaaatattttgagacgttggcacatgatgaattagagaattacataggcaacatccgaaacgatatcatgaacaatcacaagaacagaggcacttacgcggtaaacattcatgtactaacaactcccggacttaatcacgcgttttctagcttattgagtggaaagttcaaaaagtcagacggtagttatcgaacacatcctcactattcatggatgcagaatatttctattcctagaagtgttggattttatccggatcaagtaaagatttcaaaaatgttttctgtcagaaaataccatccaagtcaatatctttacttttgttcatcggacgttccggaaagaggtcctcaggtaggtttagtatctcaattgtctgtcttgagttccattacaaatatactaacgtctgagtatttggatttggaaaagaaaatttgtgagtatatcagatcatattataaagatgatataagttactttgaaacaggatttccaatcactatagaaaatgctctagttgcttctcttaatccaaatatgatatgtgattttgtaactgactttaaacgtagaaaacggatgggattcttcggtaacttggaggtaggtattactttagttagggatcacatgaatgaaattcgcattaatattggagcaggaagattagtcagaccattcttggttgtggataacggagagctcatgatggatgtgtgtccggagttagaaagcagattagacgacatgacattctctgacattcagaaagagtttccgcatgtcatcgaaatggtagatatagaacaatttacttttagtaacgtatgtgaatcggttcaaaaatttagaatgatgtcaaaggatgaaagaaagcaatacgatttatgtgactttcctgccgaatttagagatggatatgtagcatcttcactagtgggaatcaatcacaattctggacccagagctattcttggatgtgctcaagctaaacaagctatctcttgtctgagttcggatatacgaaataaaatagacaatggaattcatttgatgtatccagagaggccaattgtcattagtaaggctttagaaacttcaaagattgcggctaattgcttcggacaacatgttactatagcattaatgtcgtacaaaggtatcaatcaagaggatggaattatcatcaaaaaacaatttattcagagaggcggtctcgatattgttacagccaagaaacatcaagtagaaattccattggaaaactttaataacaaagaaagagataggtctaacgcctattcaaaattagaaagtaatggattagttagactgaatgctttcttggaatccggagacgctatggcacgaaatatctcatcaagaactcttgaagatgattttgctagagataatcagattagctttgatgtttccgaaaaatataccgatatgtacaaatctcgcgttgaacgagtacaagtagaacttactgacaaagttaaggtacgagtattaaccatgaaagaaagaagacccattctaggagacaaatttaccactagaacgagtcaaaagggaacagtcgcgtatgtcgcggatgaaacggaacttccatacgacgaaaatggtatcacaccagatgtcattattaattctacatccatcttctctagaaaaactatatctatgttgatagaggttattttaacagccgcatattctgctaagccgtacaacaataagggagaaaaccgacctgtctgttttcctagtagtaacgaaacatccatcgatacatatatgcaattcgctaaacaatgttatgagcatttaaattcgaaattgtccgatgaagaattgtcggataaaatcttttgtgaaaagattctctatgatcctgaaacggataagccttatgcatccaaagtattttttggaccaatttattacttgcgtctgagacatttaactcaggacaaggcaaccgttagatgtagaggtaaaaagacgaagctcattagacaagcgaatgagggacgaaaacgtggaggaggtattaagtttggagaaatggagagagactgtttaatagcgcatggcgcagccaatactattacagaagttttaaaagactcagaagaggattatcaagatgtgtatatttgtgaaaattgtggagacatagcagcacaaatcaaaagtattaatacatgtcttagatgttcaaaacttaatctctctcctctcttaacaaaaattgataccacgcacgtatctaaagtatttcttactcaaatgaacgccagaggcgtaaaagttaaattagatttcgaacgaaggcctccttcgttttataaaccattagataaagttgatctcaagccgtcttttctggtgtaatattctagtttggtagtagatacatatcaatatcatcaaattcgagatccgaattataaaatgggcgtggattgttaactatagaatcggtcgttatttcgtcggacgtctgatattcggaaatctgtggagtttcaggttttggtggaggtgtaactgctacttgggatactgaagtctgatattcagaaagctgggggatgttctggttcgacatccaccgatggtgtcacatcactaatcggtttggtaacgtctgtggatggaggtgctacttctacagaacctgtagcctcagttgtcaacggagatacattttcaatgcaaggaaatgtataatttggtaatggtttctcatgtggatctgaagaagaggtaagatatctactagaaagataccgatcacgttctagttctcttttgtagaacttaactttttctttctcagcatctagttgatattccaacctcttcacgttactacgttcagatttcaattcacgttcgcatgggttacctccgcagtttttacgagcgatttcacgttccagatcacgttcagccttcatgcgtctctccctctctctatcgagtttatcagagcagtctttctgaaggcgatcgaactccataaatttctccaacgctttgattgtttccatagatttccgaagttcagcttttaggactgtgattctttttcttttgaattcacagctggatgtacaaccgtttcctccgtttccattaccgccatctctaagtttcttttctagatcggcaatctttctcaacatttcatccccatgccttttacattcctcgagtctactgtcgtcgaaatatcgttccagctccttttcgacatcaataactttagcacgttgtctctcaagctctcttttgtagtaactatcatttttatctgattccctggcacgtttaagatcttcatgcaattgagtcagctcttaacacaatctcttaacttcctctcttgcttcttcgtcatagtacttacaatcactatgggatccattgttaccacgtctacactcggcgagctcgcgtttaagagattcaattttccgtttgtattggtccatgtctccattgctaccaccattagatttacaggctgctagttgtcgttcgagatcagaaatacgggttttcttgaattgatttcgtcgatgtacttggcatgattggcatcgaaacacttattaagttctttttccaattctacgattttatttctttcgcaagtcaattccctcctgtagtaactatctgttttgttagattcacgctctctacgtagactttcttgcaagttactaatttgttccctagcacgtccgagttcagttttatatgccgaatagagttctgattcatcctttgagcagatctctagcgatcgtttaagattcctgattctagtctttagcctatttacctcctcagaagatgttccgttaccgttgcgtttacactcgttaagctgtctatcaagatccatgattctatctctaagacgttgcatctctctttccatatcagcattgctttcattattacgtctgcagtcactcaactgtctttcaatatctgagattctatctctaagacgtcgcatctctctctgtttcggcattggtttcattattacgtctacagtcgttcaactgtctttcaagatctgatattctagattggagtctgctaatctctgtagcattttcacggcattcactcagttgtctttcaagatctgagattctagattggagtctgctaatctctgtaagatttcctcctccgctctcgatgcagtcggtcaacttattctctagttctctaatacgcgaacgcagtgcatcaacttcttgcgtgtcttcctggttgcgtgtacattcatcgagtctagattcgagatctctaacgcgtcgtcgttcttcctcaagttctctgcttactacagaaagcgtgtccctatcttgttgatatttagcaatttctgattctagagtactgattttgcttacgtagttactaatatttgtcttggccttatcaagatcctccttgtatttgtcgcattccttgatatccctacgaagtctggacagttcccattcgacattacgacgtttatcgatttcagctcggagatcgttatcgcgttgttttagccacatacgactgagttcaagttctcgttgacaagatccatctacttttccattcctaatagtatccagttccttttctagttctgaacgcatttctcgttccctatcaagcgattctctcaattctcggatagtcttcttatcaatttctaataaatctgaaccatcatctgtcccattttgaatatccctgtgttctttgatctcttttgtaagtcggtcgattctttcggttttataaacagaatccctttccaaagtcctaatcttactgagtttatcactaagttctgcatttaattcggtgagttttctcttggcttcttccaactctgttttaaactctccactatttccgcattcttcctcgcatttatctaaccattcaattagtttattaataactagttggtaatcagcgattcctatagccgttcttgtaattgtgggaacataattaggatcttctaatggattgtatggcttgatagcatcatctttatcattattagggggatggacaaccttaattggttggtcctcatctcctccagtagcgtgtggttcttcaataccagtgttagtaataggcttaggcaaatgcttgtcgtacgcgggcacttcctcatccatcaagtatttataatcgggttctacttcagaatattcttttctaagagacgcgacttcgggagttagtagaagaactctgtttctgtatctatcaacgctggaatcaatactcaagttaagaatagcgaatacctcatcgtcatcatccgtatcttctgaaacaccatcatatgacatttcatgaagtctaacgtattgataaatagaatcagatttagtattaaacagatccttaacctttttagtaaacgcatatgtatattttagatctccagatttcataatatgatcacatgccttaaatgtcagtgcttccatgatataatctggaacactaatgggtgacgaaaaagatacagcaccatatgctacgttgataaataaatctgaaccactaagtagataatgattaatgttaaggaagaggaaatattcagtatatagatatgccttagcatcatatcttgtactaaacacgctaaacagtttattgatgtgatcaatttccaacagaataattagagcagcgggaataccaacaaacatattaccacatccgtattttctatgaatatcacatattatgttaaaaaatcttgatagaagagcgaatatctcgtctgacttaatgagacgtagttcagcagcagcataagtcataactgtaaatagaacatactttcctgtagtgttgattctagactccacatcaacaccattattaaaaatagttttatatacatctttaatctgctctccgttaatcgtcgaacgttctagtatacggaaacactttgatttcttatctgtagttaatgacttagtgatatcacgaagaatattacgaattacatttcttgtttttcttgagagacctgattcaaaactcaactcatcgttccatagtttttttacctcagtggcgaaatctttggagtgcttggtacatttttcaataaggttcgtgacctccatttattataaaaaattttattcaaaacttaactacaatcgggtaattataaaatcgtagatctcccatgtggtggaatactaccatctatcgcatgtggatggacagtaggtaatggccatgggaacagtaatgtttgcatatttatctttcttgccagtattactgcatattgtcccaatgtttcgatgtgatgttctaacctatcaactgccgctgtatcacaacaatagtgtccgatggaattaagattatgatccaatgtgtttaatatatgattatcaagtcttatacgatccgcgtcttttttgacaggatcaggttcttctacaggaagaagtttcggcctcttatgatattcatgtctgggaaacggtggtctagggtgaggctccggtatcggagtgggttttggattataatcatcatcgtctatgacatcatcatcttcgacttcgatatttattttgctatcttgatgatgtcctgtatcagttgcattttcagcactcgactgaatattagcgcattcattgtctattattaccatatttctaaacccaaaatgtatgtgttgaacatcactactatcgttgatgagtcttatagcatgaattcgcttatcgttatcgggtttagcttctgtcaccttagcaattccttttttattaaactctacataatcatatccatttctattgtttgttctaatataaacgagtatagcatcattgctaaatttttcaatagtatcgaaaacagaatatcctaaaccatataatatatattcaggaacactcaaactaaatgtccaggattctcctaaatacgtaaactttaatagtgcgaaatcattcaaaaatctaccacttatagatagatagtacataaatgcgtatagtagtctacctatctctttattatgaaaaccggcattacgatcatatatgtcgtgatatacctgtgatccgtttacgttaaaccataaatacatgggtgatcctataaacatgaatttatttctaattctcagagctatagttaattgaccgtgtaatatttgcttacatgcatacttgatacgctcattaataagatttttatcattgctcgttatctcaggatcgtatatataaggagtaccatcgtgattcttaccagatattatacaaaatactatatataaaatatattgaccaacgttagtaatcatataaatgtttaacgttttaaattttgtattcaatgatccattatcatacgctagcatggttttatgatattcattctttaaaatataatattgtgttagccattgcattggggctcctaatggagattttttattctcatccattttaggataggctttcataaagtccctaataacttcgtgaataatgtttctatgttttctactgatgcatgtatttgcttcgatttttttatcccatgtttcatctatcatagatttaaacgcagtaatgctcgcaacattaacatcttgaaccgttggtacaattccgttccataaatttataatgttcgccatttatataactcattttttaaatatacttttaattgaacaaaagagttaagttactcatatggacgccgtccagtctgaacatcaatctttttagccagagatatcatagccgctcttagagtttcagcgtgattttccaacctaaatagaacttcatcgttgcgtttacaacacttttctatttgttcaaactttgttgttacattagtaatctttttttccaaattagttagccgttgtttgagagtttcctcattgtcgtcttcatcggctttaacaattgcttcgcgtttagcctctggctttttagcagcctttgtagaaaaaaattcagttgctggaattgcaagatcgtcatctccggggaaaagagttccgtccatttaaagtacagattttagaaactgacactctgcgttatttatatttggtacaacacatggattataaatatcgatgttaataacatcagaaaatgtaaagtctatacattgttgcatcgtgttaaattttctaatggatctagtattattgggtccaacttctgcctgaaatccaaatatggaagcggatacaaaaccgtttcctggataaaccacacatctccacttttgctttacatcagaaattgtgtcgttgacatcttgaactctcctatctaatgccggtgttccacctatagattttgaatattcgaatgctgcatgagtagcattaaattccttaatattgccataattttcatatattgagtaaccctggataaaaagtaaacacaccgcagccgtcgctaccacaataaaaaaaattgatagagagttcatttataatctattagaagctgacaaaatttttttacacgcatcagacaatgctttaataaatagttcaacatctacttttgtcatatcgaaccgatggtatgattctaacctagaattacatccgaaaaagttgactatgttcatagtcattaagtcattaacaaacaacattccagactctggattataagacgatactgtttcgtcacaattacctaccttaatcatgtgattatgaatattggctattagagcaccttctaagaaatctataatatctttgaaacacgatttaaaattaaaccacgaatatacttctacgaagaaagttagtttacccataggagaaataactataaatggagatctaaatacaaaatccggatctatgatagttttaacattattatattctctattaaatacctccacatctaaaaatgttaattttgaaactatgtcttcgtttattaccgtacctgaactaaacgctataagctctattgtttgagaactctttaaacgatattcttgaaatacatgtaacaaagtttcctttaactcggtcggtttatctaccatagttacagaatttgtatccttatctataatataataatcaaaatcgtataaagttatataattatcgcgttcagattgggatcttttcaaatagactaaaaaccccatttctctagtaagtatcttatgtatatgtttgtaaaatatcttcatggttggaatatgctctaccgcagttatccattcctcattgacagcggtagatgtattagacaaaactattccaatgtttaacaagggccattttacgagattattaaatccttgtttgataaatgtagccaatgagggttcgagttcaacgacgattgaattctcttcccgcggatgctgcatgatgaacgacgggatgttgttcgattgatttggaattctttttcgactttttgtttatattaaatattttaaaatttatagctgatagcaattcatgtactacggataatgtagacgcgtattgcgcatcgatatctttattattagataaatttatcaataaatgtgagaagtttgcctcgttaaggtcttccatttaaatattatataaacatttgtgtttgtaacttattcgtcttttatggaatagtttttaactagtaaagctgtaattacatactttgtccgtaaaacataaatataaacacccgcttttatcaaacgttccaaaaagtcgacagcggacatttttaacatggcatctattttaaatacacttaggtttttggaaaaaacatcattttataattgtaacaattcaataactaaagaaaagattaagattaaacataagggaatgtcatttgtattttataagccaaagcattctaccgttgttaaatacttgtctggaggaggtatatatcatgatgatttggttgtattggggaaggtaacaattaataatctaaagatgatgctattttacatggatttatcatatcatggagtgacaagtagtggagcaatttacaaattgggatcgtctatcgatagactttctctaaataggactattgttacaaaagttaataataattataataattataattattataattatgatgatacattttttgacgacgatgattgatcgctattgcacaattttgtttttgtactttctaatatagtgtttaggttctttttcatatgagaatattgatttactaaaatatctatgtttaacttttgttctataacgtccttatcggcggtatcggtacatatacgtaattcaccttcacaaaatacggagtcttcgataataatagccaatcgattattggatctagctgtctgtatcatattcaacatgtttaatatatcctttcgtttcccctttacaggcatcgatcgtagcatattttccgcgtctgagatggaaatgttaaaactacaaaaatgcgtaatgttagcccgtcctaatattggtacgtgtctataagtttggcatagtagaataatagacgtgtttaaatgccttccaaagtttaagaattctattagagtattgcattttgatagtttatcgcctacatcatcaaaaataagtaaaaagtgtgctgattttttatgattttgtgcgacagcaatacatttttctatgttacttttagttcgtatcagattatattctagagattcctgactactaacgaaattaatatgatttggccaaatgtatccatcataatctgggttataaacgggtgtaaacaagaatatatgtttatattttttaactagtgtagaaaacagagatagtaaatagatagtttttccagatccagatcctcccgttaaaaccattctaaacggcatttttaataaattttctcttgaaaattgtttttcttggaaacaattcataattatatttacagttactaaattaatttgataataaatcaaaatatggaaaactaaggtcgttagtagggaggagaacaaagaaggcacatcgtgacataaataacatttattatcatgatgacaccagaaaacgacgaagagcagacatctgtgttctccgctactgtttacggagacaaaattcagggaaagaataaacgcaaacgcgtgattggtctatgtattagaatatctatggttatttcactactatctatgattaccatgtccgcgtttctcatagtgcgcctaaatcaatgcatgtctgctaacgaggctgctattactgacgccgctgttgccgttgctgctgcatcatctactcatagaaaggttgcgtctagcactacacaatatgatcacaaagaaagctgtaatggtttatattaccagggttcttgttatatattacattcagactaccagttattctcggatgctaaagcaaattgcactgcggaatcatcaacactacccaataaatccgatgtcttgattacctggctcattgattatgttgaggatacatggggatctgatggtaatccaattacaaaaactacatccgattatcaagattctgatgtatcacaagaagttagaaagtatttttgtgttaaaacaatgaactaatatttatttttgtacattaataaatgaaatcgcttaatagacaaactgtaagtaggtttaagaagttgtcggtgccggccgctataatgatgatactctcaaccattattagtggcataggaacatttctgcattacaaagaagaactgatgcctagtgcttgcgccaatggatggatacaatacgataaacattgttatttagatactaacattaaaatgtctacagataatgcggtttatcagtgtcgtaaattacgagccagattgcctagaccggatactagacatctgagagtattgtttagtattttttataaagattattgggtaagtttaaaaaagaccaataataaatggttagatattaataatgataaagatatagatattagtaaattaacaaattttaaacaactaaacagtacgacggatgctgaagcgtgttatatatacaagtctggaaaactggttaaaacagtatgtaaaagtactcaatctgtactatgtgttaaaaaattctacaagtgacaacaaaaaatgaattaataataagtcgttaacgtacgccgccatggacgccgcgtttgttattactccaatgggtgtgttgactataacagatacattgtatgatgatttcgatatttcaatcatggactttataggaccatacattatatgtaacataaaaactgtccaaatagatgtacgggatataaaatattccgacatgcaaaaatgctactttagctataagggtaaaatagttcctcaggattctaatgatttggctagattcaacatttatagcatttgtgccgcatacagatcaaaaaataccatcatcatagcatgcgactatgatatcatgttagatatagaaggtaaacatcagccattttatctattcccatctattgatgtttttaacgctacaatcatagaagcgtataacctgtatacagctggagattatcatctaatcatcaatccttcagataatctgaaaatgaaattgtcgtttaattcctcattctgcatatcagacggcaatggatggatcataattgatgggaaatgcaatagtaattttttattataaaagttgtaaagtaaataataaaacaataaatattgaactagtagtacgtatattgagcaatcagaaatgatgctggtacctcttatcacggtgaccgtagttgcgggaacaatattagtatgttatatattatatatttgtaggaaaaagatacgtactgtctataatgacaataaaattatcatgacaaaattaaaaaagataaagagttctaattccagcaaatctagtaaatcaactgatagcgaatcagactgggaggatcactgtagtgctatggaacaaaacaatgacgtagataatatttctaggaatgagatattggacgatgatagcttcgctggtagtttaatatgggataacgaatccaatgttatggcgcctagcacagaacacatttacgatagtgttgctggaagcacgctgctaataaataatgatcgtaatgaacagactatttatcagaacactacagtagtaattaatgaaacggagactgttgaagtacttaatgaagataccaaacagaatcctaactattcatccaatcctttcgtaaattataataaaaccagtatttgtagcaagtcaaatccgtttattacagaacttaacaataaatttagtgagaataatccgtttagacgagcacatagcgatgattatcttaataagcaagaacaagatcatgaacatgaacacgatgatatagaatcatcggttgtatcattggtgtgattagtttcctttttataaaattgaagtaatatttagtattattgctgccgtcacgttgtacaaatggagatattccctgtattcggcatttctaaaattagcaattttattgctaataatgactgtagatattatatagatacagaacatcaaaaaattatatctgatgagatcaatagacagatggatgaaacggtacttcttaccaacatcttaagcgtagaagttgtaaatgacaatgagatgtaccatcttattcctcatagattatcgacgattatactctgtattagttctgtcggaggatgtgttatctctatagataatgacgtcaatggcaaaaatattctaacctttcccattgatcatgctgtaatcatatccccactgagtaaatgtgtcgtagttagcaagggtcctacaaccatattggttgttaaagcggatatacctagcaaacgattggtaacatcgtttacaaacgacatactatatgtaaacaatctgtcactgattaattatttgccgttgtctgtatttattattagacgagttaccgactatttggatagacacatatgcgatcagatatttgcgaataataagtggtattccattataaccatcgacaataagcagtttcctattccatcaaactgtataggtatgtcctctgccaagtacataaattctagcatcgatcaagatactttaatacatgtttgtaacctcgagcatccattcgacttagtatacaaaaaaatgcagtcgtacaattctgtacctatcaaggaacaaatattgtacggtagaattgataatataaatatgagcattagtatttctgtgtattaatagatttctagtatggggatcattaatcatctctaatctctaaatacctcataaaacgaaaaaaatactgctacaaatgaaaaaaaagctattatcaaatactgtacggaatggattcattctcttctctttttatgaaactctgttgtatatctactgataaaactggaagcaaaaaatctgataaaaagaataaaaataagatcaaggattatatggaacacgattattataaaataacaatagttcctggttcctcttccacgtctactagctcgtggtattatacacatgcctagtaatagtctctttgcgttgatggaaagcagactagaaataacaggctaaaatgttcagacaccataatagttcccaacccagataataacagagttccatcaacacattcctttaaactcaatcccaaacccaaaaccgttaaaatgtatccggccaattgatagtagataatgaggtgtacagcacatgataatttacacagtaaccaaaatgaaaacactttagtaattataagaaatatagacggtaatgtcatcatcaacaatccgataatatgcctgagagtaaacattgatggataaaacaaaaatgccccgcataactctatcatggcaataatacaaccaaacacttgtaaaattcctaaattagtagaaaatacaactgatatcgatgtataagcgatttcgaggaataataaaaacaaagtaatgcccgtaaagataaacatcaacattgtttggtaatcattaaaccaattagtatgacgttgaactaatttcacagtaaattttattccagtattatccccgcatgtatacgtacctggtaagatatctttatattctataatcaatgagacatcactatccgataacgaatgaagtctagcactagtatgccatttacttaatatggtcgtcttggaagttttattataagttaaaatatcatggttgtccaatttccatctaatatactttgtcggattatctatagtacacggaataatgatggtattattacatgctgtatactctatagtctttgtagatgttataatcataaaagtacagaggtatatcaacaatattctaactcttaacatttttatttatttaaaatgatacctttgttatttattttattctattttgctaacggtatcgaatggcataagtttgaaacgagtgaaaaaataatttctacttacttaatagatgacgtattatacacgggtgttaatgggggggcagtatatacattttcaaataataaactaaacaaaactggtttagctaatactaattatatcacaacatctataaaagtagagaatgaggatacattagtatgcggaaccaataacggaaatcccaaatgttggaaaatagacggttcagacgacccaaaacatagaggtagaggatacgctccttatagcaaagtaacgataatcagttacaacgaatgtgtactatctgacataaacatatcaaaagaaggaattaaacgatggagaagatttgacggaccatgtggttatgatttattcacggcggataacgtaattccaaaagatggtttacgaggagcattcgtcgataaagacggtacttatgacaaagtttacattcttttcactgatactatcggctcaaagagaattgttaaaattccgtatataacacaaatgtgcttaaacgacaaaggtggtccatcatcgttgtctagtcatagatggtcgacgtttttcaaagtcgaattagaatgtgacatcgacggaagaagttatagacaaattattcattctaaaactataaaaacagataatgatacgatactatatgtattcttcgatagtccttattccaagtccgcattatgtacctattctatgaataccattaaacaatctttttctacgtcaaaattggaaggatatacaaagcaattgccgtctccagctcctggtatatgtttaccagctggaaaagttgtttcacataccacgtttgacgttatagaacaatataatgtactagatgatattataaagcctttatctaaaccaacctatcttcgaaggaccgtctggcgttaaatggttcgatataaaggagaaggaaaatgaacatcgggaatatagaatatacttcataaaaaaaaattttatatattcattcgatacaaaaactaaacaaactcgcagtgcacaagtcaatgcacaactattttcagtaatggtaactgcgaaaccgttatttatagcagatatagggataggagtaggaatgccacgaatgaaaaaatacttaaaatgtaatcttaattcgagtacaccacacgacaatgaacaaacctaagacagattatgctggttatgcttgctgcgtaatatgcggtttaattgtcgaaattatttttacagcgacactattaaaagttgtagaacgtaaattagttcatacaccatcaatagataaaacgataaaagatgcatatattagagaagattgtcctactgactggataagctataataataaatgtatacatttatctactaatcaaaaaacctgggaggaaggacgtaatacatgcaaagctctaaatccaaattcggatctaattaagatagagactccaaacgagttaagttttttaagaagccttagacgaggctattgggtaggagaatccgaaatattaaaccagacaaccccatataattttatagctaaaaatgccacgaagaatggaactaaacatatgaacggaactaaaaaacggaaatatatttgtagtacaacgaatactcccaaactgcattcgtgttacactatataacaattacactacatttttatcataacactacttcggttagatgttttagaaaaaaataaatattgccgtactgttcttgtttttataaaaataacaattaacaattatcaaattttttctttaatattttacgtggttgaccattcttggtggtaaaataatctcttagtgttggaatggaatgctgtttaatgtttccacactcatcgtatattttgacgtatgtagtcacatcgtttacgcaatagtcagactgtagttctatcatgcttcctacattagaaggaggaacagttttaaagtctcttggttttaatctattaccgttagttttcatgaaatcctttgttttatccacttcacattttaaataaatgtccactatacattcttttgttaattttactagatcgtcatgggtcatagaatttataggttccgtagtccatggatccaaactagcaaacttcgcgtatacggtatcgcgattagtgtatacaccaactgtatgaaaattaagaaaacagtttaatagatcaacagaaatatttaatcctccgtttgatacagatgcaccatatttatggattttggattcacacgttgtttgtctgaggggttcgtctagcgttgcttctacataaacttctattcccatatattctttattgtcagaatcgcataccgatttatcatcatacactgtttgaaaactaaatggtatacacatcaaaataacaaatactaacgagtacattctgcaatattgttatcgtaattggaaaattagtgttcgagtgagtcggattatgtgagtactggattgtatattttattttatattttatattttgtaataagaataaaatgctaatgtcaagtttattccaatagatgtcttattaaaaacatatataataaataacaatggctgaatggcataaaattatcgaggatatctcaaaaaataataagtttgaggatgccgccatcgttgattacaagactacaaagaatgttctagcggctattcctaacagaacatttgcaaagattaatccgggtgaagttattccgctcatcactaatcataatattctaaaacctcttattggtcagaaattttgtattgtatatactaactctctaatggacgagaacacgtatgctatggagttgcttactgggtacgcccctgtatctccgatcgttatagcgagaactcataccgcacttatatttttgatgggtaagccaacaacatccagacgtgatgtgtatagaacgtgtagagatcacgctacccgtgtacgcgcaactggtaattaaaataaaaagtaatattcatatgtagtgtcaattttaaatgatgatgaaatggataatatccatattgacgatgttaataatgccggtattggcatacagttcatcgatttttagatttcattcaaaggatgtggaattatgttatgggaatttgtattttgataggatctataataatgtagtaaatataaaatatattcctgagcatattccatatagatataattttattaatcgcgcgttctccgtagatgaactagacgataatgtcttttttacacatggttattttttaaaacacaaatatggttcacttaatcctagtttgattgtctcattatcaggaaacttaaaatataatgatatacaatgctcagtaaatgtattgtgtctcattaaaaatttggcaacgagtacatctactatattaacatctaaacacaaaacgtattctctacatcggtccaagtgtattattataataggatatgattctattatatggtataaagatataaatgacaagtataatggcatctatgattttactgcaatatgtatgctaatagcgtctacattgatagtgaccatatacgtgtttaaaaaaataaaaatgaactcttaattatgctatgctattagaaatggataaaatcaaaattacggttgattcaaaaattggtaatgttgttaccatatcgtataacttggaaaagataactattgatgttacaccaaaaaagaaaaggatgtattattagcgcaatcagttgctgtcgaagaggcaaaagatgtcaaggtggaagaaaaaaatattatcgatattgaagatgacgatgatatggatgtaaaaagcgcgtaatactatctataaacataagtatataataaatactttttatttacggtactcttgtagtggtgataccctactcaattatttttttaaaaaaatacttattctgattcttctagccatttccgtgttcgttcgaatgccacatcgacgttaaagataggggagtagttgaaatctagttctgcattgttggtacgcaccttaaatgtagtgttggatatcttcaacgtatagttgttgagtagtgatggttttctaaatagaattctcttcatatcattcttgcacgcgtacatttttagcatccatcttggaatcctagatccttgttctattcccaatggtttcatcaatagaagattaaacatatcgtacgaacacgatggagagtaatcgtagcaaaagtaagcatttcctttaatctcagatcccggatactggatatattttgcagccaacacgtgcatccatgcagcatttcctacatatacccggctatgtaccgcgttatcatcgactgtacgatacataatgttaccgtgttgcttacattgctcgtaaaagactttcgtcaatttgtctccttctccgtaaattccagtgggtcttaggcaacaagtatacaattttgctccattcatgattacggaattattggctttcataaccagttgctcggccatacgtttactttttgcgtatacatgtcctggtgatatatcataaagggtatgctcatggccgatgaatggatcaccgtgtttattgggtcctattgcttccatgctactagtatagatcaaatacttgattcctaggtccacacaagctgccaaaatagtctgtgttccataatagtttactttcatgatttcattatcggtgtattttccaaatacatccactagagcagctgtatgaataatcagatttaccccatttagcgcttctcttaccttatcaaagtcgtttatatcacattgtatatagtttataaccttaaccttcgaggttattggttgtggatcttctacaatatctatgactctgatttcttgaacatcatctgcactaattaaaagttttactatatacctgcctagaaatccggcaccaccagtaaccgcgtacacggccattgctgccactcataatatcaaactacttattctattttactaaataatggctgtttgtataatagaccacgataatatcagaggagttatttactttgaaccagttcatggaaaagataaagttttaggatcagttattggattaaaatccggaacgtatagtttgataattcatcgttacggagatattagtcaaggatgtgattccataggcagtccagaaatatttatcggtaacatctttgtaaacagatatggtgtagcatatgtttatttagatacagatgtaaatatatttacaattattggaaaggcgttatctatttcaaaaaatgatcagagattagcgtgtggagttattggtatttcttacataaatgaaaagataatacattttcttacaattaacgagaatggcgtttgatatatcagttaatgcgtctaaaacaataaatgcattagtttacttttctactcagcaaaataaattagtcatacgtaatgaagttaatgatacacactacactgtcgaatttgatagggacaaagtagttgacacgtttatttcatataatagacataatgacaccatagagataagaggggtgcttccagaggaaactaatattggttgcgcggttaatacgccggttagtatgacttacttgtataataagtatagttttaaactgattttagcagaatatataagacacagaaatactatatccggcaatatttattcggcattgatgacactagatgatttggctattaaacagtatggagacattgatctattatttaatgagaaacttaaagtagactccgattcgggactatttgactttgtcaactttgtaaaggatatgatatgttgtgattctagaatagtagtagctctatctagtctagtatctaaacattgggaattgacaaataaaaagtataggtgtatggcattagccgaacatatatctgatagtattccaatatctgagctatctagactacgatacaatctatgtaagtatctacgcggacacactgagagcatagaggataaatttgattattttgaagacgatgattcgtctacatgttctgccgtaaccgacagggaaacggatgtataatttttttatagcgtgaaggatatgataaaaaatataattgttgtatttatcccattccaatcaccttatatgattctgtaaaaaaattatactgtaacacaatgaaggagtcttatagatgtatagaggtcagatactggtttgataaactgtttattccacataagtatgtttgactttatggttaaacccgcatactttaacaaatcactgaaaattggagttaggtattgacctctcagaatcagttgccgttctggaacattaaatgtattttttatgatatactccaacgcatttatgtgggcatacaacaagtcattactaatggagtattccaagagttttagttgtctagtatttaacaagagaagagatttcaacagactgtttatgaactcgaatgccgcctcattgtcgcttatattgatgatgtcgaattctcccaatatcatcaccgatgagtagcttatcttgttatcgggatccaagttttctaaagatgtcattaaaccctcgatcatgaatggatttatcatcatcgtttttatgttggacatgagcttagtccgtttgtccacatctatagacgacgatttctgaattatttcatatatccctctctttaactccaggaacttgtcaggatggtctactttaatatgttctcgtctaagagatgaaaatctttggatggttgcacgcgacttttctctaaaggatgacgttgcccaagatcctctcttaaatgaatccatcttatccttggacaagatggacagtctattttccttagatggtttaatatttttgttacccatgatctataaaggtagacctaatcgtctcggatgaccatatatttattttcagttttattatacgcataaattgtaaaaaatatgttaggtttacaaaaatgtctcgtggggcattaatcgtttttgaaggattggacaaatctggaaaaacaacacaatgtatgaacatcatggaatctataccggcaaacacgataaaatatcttaactttcctcagagatccactgtcactggaaagatgatagatgactatctaactcgtaaaaaaacctataatgatcatatagttaatctattattttgtgcaaatagatgggagtttgcatcttttatacaagaacaactagaacagggaattactttaatagttgatagatacgcattctctggagtagcgtatgccgccgctaaaggcgcgtcaatgactctcagtaagagttatgaatctggattgcctaaacccgacttagttatattcttggaatctggtagcaaagaaattaatagaaacgtcggcgaggaaatttatgaagatgttacattccaacaaaaggtattacaagaatataaaaaaatgattgaagaaggagatattcattggcaaattatttcttctgaattcgaggaagatgtaaagaaggagttgattaagaatatagttatagaggctatacacacggttactggaccagtggggcaactgtggatgtaatagtgaaattacattttttataaatagatgttagtacagtgttataaatggatgaagcatattactctggcaacttggaatcagtactcggatacgtgtccaatatgcataccgaactcgtatcaatatctcaattagttattgccaagatagaaactatagataatgatatattaaacaaggacattgtaaattttatcatgtgtagatcaaacttggataatccatttatctctttcctagatactgtatatactattatagatcaagagaactatcagactgagttgattaattcattagacgacaatgaaattatcgattgtatagttaataagtttatgagcttttataaggataacctagaaaatatagtagatgctatcatcactctaaaatatataatgaataatccagattttaaaactacgtatgtagaagtactcggttccaaaatagcggatatagatattaaacaagtgatacgtgagaatatactacaattgtctaatgatatccgcgaacgatatttgtgaaaatattaaaaaaaaatactttttttattaaatgacgtcttttcgtgaatttagaaaattatgctgtgctatatatcacgcatcaggatataaagaaaaatctaaattaattagagactttataacagatagggatgataaatatttgatcattaagctattgcttcccggattagacgatagaatttataacatgaacgataaacaaattataaaattatatagtataatatttaaacaatctcaggaagatatgctacaagatttaggatacggatatataggagacactattagtacattcttcaaagaaaacacagaaatccgtccaagagataaaagcattttaactttagaagacgtggatagtttcttaactacgttatcatccgtaactaaagaattgcatcaaataaaattattgactgatgtagcatctgtttgtacatgtaatgatttaaaatgtgtagtcatgcttattgataaagatctaaaaattaaagcgggccctcggtacgtacttaacgctattagtcctcatgcctatgatgtttttagaaaatctaataacttgaaagagataatagaaaattcatctaaacaaaatctagactttatatctatttctgttatgactccaattaatcccatgttagcggaatcgtgtgattctgtcaataaggcgtttaaaaaatttccatcaggaatgtttgcggaagttaaatacgatggtgaaagagtacaagttcataaaaataataacgagtttgccttctttagtagaaacatgaaaccagtactctctcataaagtggattatctcaaagaatacataccgaaagcatttaaaaaagctacgtctatcgtattggattctgaaattgttcttgtagacgaacataatgtaccgctcccgtttggaagtttaggtatacacaaaaaaaaagaatataaaaactctaacatgtgtttgttcgtgtttgactgtttgtactttgatggattcgatatgacggacattccattgtacgaacgaagatcttttctcaaagatgttatggttgaaatacccaatagaatagtattctcagagttgacgaatattagtaacgagtctcagttaactgacgtattggatgatgcactaacgagaaaattagaaggattggtcttaaaagatattaatggagtatacgaaccgggaaagagaagatggttaaaaataaagcgagactatttgaacgagggttccatggcagattctgccgatttagtagtactaggtgcttactatggtaaaggagcaaagggtggtatcatggcagtctttctaatgggttgttacgacgatgaatccggtaaatggaagacggttaccaagtgttcaggacacgatgataatacgttaaggaagttgcaagaccaattaaagatgattaaaattaacaaggatcccaaaaaaattccagagtggttagtagttaataaaatctatattcccgattttgtagtagaggatccaaaacaatctcagatatgggaaatttcaggagcagagtttacatcttccaagtcccataccgcaaatggaatatccattagatttcctagatttactaggataagagaggataaaacgtggaaagaatctactcatttaaacgatttagtaaacttgactaaatcttaatagttacatacaaactaaaaattaaaataacactatttagttggtggtcgccatggatggtgttattgtatactgtctaaacgcgctagtaaaacatggcgaggaaataaatcatataaaaaatgatttcatgattaaaccatgttgtgaaagagtttgtgaaaaagttaagaacgtttacatcgacggacaatctaaaaacaatacagtgattgcagatttgccatatctggataatgctgtatcggatgtatgcaaatatatatatagtatcaagaatatccagatttgctaatttgataaagatagatgacgatgacaagactcctactggtgtatataattattttaaacctaaagatgccattcctgttattatatccataggaaaggatagagatgtttgtgaactattaatttcatctgataaagcgtgtgcgtgtatagagttaaattcatataaagtagccattcttcccatggatgtttccttttttaccaaaggaaatgcatcattgattattctcctgtttgatttctctatcgatgcggcacctctcttaagaagtgtaaccgataataatgttattatatctagacaccagcgtctacatgacgagcttccgagttccaattggttcaagttttacataagtataaagtccgactattgttctatattatatatggttgttgatggatctgtgatgcatgcaatagctgataatagaacttacgcaaatattagcaaaaatatattagacaatactacaattaacgatgagtgtagatgctgttattttgaaccacagattaggattcttgatagagatgagatgctcaatggatcatcgtgtgatatgaacagacattgtattatgatgaatttacctgatgtaggcaaatttggatctagtatgttggggaaatatgaacctgacatgattaagattgctcttttggtggctggtaatttaataagaaatcgagactacattcccgggagacgaggctatagctactacgtttacggtatagcctctagataatttttttaagcacgaaataaaaaacataattttaaaccaatctattttatactattttgtgtaatcaccatggacataaagatagatattagtatttttggtgataaatttacggtgactactaggagggaaaatgaagaaagaaaaaaatatctacctctccaaaaagaaaaaactactgatgttatcaaacctgattatcttgagtacgatgacttgttagatagagatgagatgtttactattctagaggaatattttatgtacagaggtctattaggcctcagaataaaatatggacgactctttaacgaaattaaaaaattcgacaatgatgcggaagaacaattcggtactatagaagaactcaagcataaacttagattaaattctgaagagggagcagataactttatagattatataaaggtacaaaaacaggatatcgtcaaacttactgtatacgattgcatatctatgataggattgtgtgcatgcgtggtagatgtttggagaaatgagaaactgttttctagatggaaatattgtttacgagctattaaactgtttattaatgatcacatgcttgataagataaaatctatactgcagaatagactagtgtatgtggaaatgtcatagaaagttaaaagttaatgagagcaaaaatatataaggttgtattccatatttgttattttttctgtaatagttaaaaaatacattcgatggtctatctatcagattattatgtgttataaggtactttttctcataataaactagagtatgagtaagatagtgtttttcaaaacatataaatctaaaattgatggatgagatatacagctattaatttcgaaaatatattttaatctgataactttaaacatggatttttgatggtggtttaacgttttaaaaaaagattttgttattgtagtatatgataatattaaaagatggatataaagaatttgctgactgcatgtactattttttacattactacattggctacggcagatatacctactccgccaccacacgctccggtaaacgggtcatgtgacaagggagaatatcttgataagaggcataatcaatgttgtaatcggtgtccacctggagaatttgccaaggttagatgtaatggtaacgataacacaaaatgtgaacgctgcccacctcatacatataccgcaatcccaattattctaatggatgtcatcaatgtagaaaatgcccaaccggatcatttgataaggtaaagtgtaccggaacacagaacagtaaatgttcgtgtcttcctggttggtattgcgctactgattcttcacagactgaagattgttgaaattgtgtaccaaaaaggagatgtccatgcggatactttggtggaatagatgaacaaggaaatcctatttgtaaatcgtgctgtattggtgaatattgcaactacctacgtaattatagacttgatccattttctccatgcaaactatctaaatgtaattaattatgattatgattatgattttgattttgattttgatgataatgttaccatacattatatcgctacttggttagtgtattattcagtatgaagacctattaataattacttatcttttgacgatcttgttataattataatataaaaacttatggcatagtaacttataattgctaacacgataaattcgtaataatctgttttgttcaaatttttataaggaatctacaggcataaaaataaaaatataatctataatatactcttacaacgccatcatgaatagcagcagtaaattaattgctgttattaatggatttagaaatagtggacgattttgtgatattaatatagttattaatgatgaaaggataaacgctcataaactcatcctatctggagcctccgaatatttttccattctgttttccaataattttatcgattctaatgaatacgaagttaatctaagtcatttagattatcaaagcgtaaacgatttgatcgattatatttatgggatacctttgagcctaactaacgataacgtgaaatatattctttcaaccgctgattttttacaaattggatctgctattacggagtgtgaaaattacatacttaaaaatctttgttctaaaaactgtatcgatttctacatatacgctgataaatataataacaagaaaatagaatcagcgtcgtttaacacaatattacaaaatattttgagactcatcaacgatgaaaactttaaatacttaacagaggaatcaatgataaaaattttaagcgatgatatgttaaatataaaaaatgaggatttcgccccactaattctcattaaatggttagagagtactcaacaaccatgcaccgtcgagttacttaaatgcctcagaatatcattgctttccccacaagttataaaatcactttatagtcatcgactggttagttcaatctacgaatgtataacattcttaaacaatatagcattcttggatgaatcatttcctagataccatagcatcgagttgatatctatcggtataagtaattcgcgtgataaaatttccataaactgctacaatcataaaaaaaatacatgggaaatgatatcttcacgtagatataggtgtagtttcgcagtggccgtcctggataatattatttatatgatgggtggatatgatcagtccccgtatagaagttcaaaggttatagcgtacaatacatgtacaaattcttggatatatgatataccagagctaaaatatcctcgttctaattgtgggggactggctgatgacgaatacatttattgtataggcggcatacgcgatcaggattcatcgttgacatctagtattgataaatggaagccatcaaaaccatattggcagaagtatgctaaaatgcgcgaaccaaaatgtgatatgggggttgcgatgttaaacggattaatatatgttataggtggaatcgttaaaggtgacacgtgtaccgacgcactagagagtttatcagaagatggatggatgaagcatcaacgtcttccaataaaaatgtccaatatgtcgacgattgttcatgatggcaagatttatatatctggaggttacaacaatagtagtgtagttaatgtaatatcgaatctagtccttagctataattcgatatatgatgaatggaccaaattatcatcattaaatattcctagaattaatcccgctctatggtcaacgcataataaattatatgtaggaggaggaatatctgatgatgttcgaactaatacatctgaaacatacgataaagaaaaagattgttggacattggataatggtcacgtgttaccacgcaattatataatgtataaatgcgaaccgattaaacataaatatccattggaaaaaacacagtacacgaatgattttctaaagtatttggaaagttttataggtagttgatagaacaaaatacataattttgtaaaaataaatcactttttatactaatatgacacgattaccaatacttttgttactaatatcattagtatacgctacaccttttcctcagacatctaaaaaaataggtgatgatgcaactctatcatgtaatcgaaataatacaaatgactacgttgttatgagtgcttggtataaggagcccaattccattattcttttagctgctaaaagcgacgtcttgtattttgataattataccaaggataaaatatcttacgactctccatacgatgatctagttacaactatcacaattaaatcattgactgctagagatgccggtacttatgtatgtgcattctttatgtcatcaactacaaatgacactgataaagtagattatgaagaatactccacagagttgattgtaaatacagatagtgaatcgactatagacataatactatctggatctacacattcaccagaaactagttctgagaaaccagaggatatagataattttaattgctcgtcggtattcgaaatcgcgactccggaaccaattactgataatgtagaagatcatacagacaccgtcacatacactagtgatagcattaatacagtaagtgcaacatctggagaatccacaacagacgagactccggaaccaattactgataaagaagatcatacagttacagacactgtctcatacactacagtaagtacatcatctggaattgtcactactaaatcaaccaccgatgatgcggatctttatgatacgtacaatgataatgatacagtaccatcaactactgtaggtagtagtacaacctctattagcaattataaaaccaaggactttgtagaaatatttggtattaccgcattaattatattgtcggccgtggcaatattctgtattacgtattatatatgtaataaacgttcacgtaaatacaaaacagagaacaaagtctagatttttgacttacataaatgtctgggatagtaaaatctatcatattgagcggaccatctggtttaggaaagacagccatagccaaaagactgttaaaagactatgggaatatatttggatttgtggtgtcccataccactagatttcctcgtcctatggaacgagaaggtgtctattaccattacgttaacagagaggccatctgaaagggaatagccgccggaaactttctagaacatactgagtttttaggaaatatttacggaacttctaaaacagctgtgaatacagcggctattaataatcgtatttgtgtgatggatttaaacatcgacggtgttagaagttttaaaaatacttacctaatgccttactcggtgtatataagacctacctctcttaaaatggttgagaccaagcttcgttgtagaaacactgaagctaacgatgagattcatcgtcgtgtgatattggcaaaaacggatatggatgaggccaacgaagcaggtctattcgacactattattattgaagatgatgtgaatttagcatatagtaagttaattcagatactacaggaccgtattagaatgtattttaacactaattaaagacttaagacttaaaacttgataattaataatataactcgtttttatatgtgtctatttcaacgtctaatgtattagttaaatattaaaacttaccacgtaaaacttaaaatttaaaatggtatttcattgacagatagatcacacattatgaactttcaaggacttgtgttaactgacaattgcaaaaatcaatgggtcgttggaccattaataggaaaaggtggatttggtagtatttatactactaatgacaataattatgtagtaaaaatagagcccaaagctaacggatcattatttaccgaacaggcattttatactagagtacttaaaccatccgttatcgaagaatggaaaaaatctcacaatataaagcacgtaggtcttattacgtgcaaggcatttggtctatacaaatccattaatgtggaatatagattcttggtaattaatagattaggtgcagatctagatgcggtgatcagagccaataataatagactaccaaaaaggtcggtgatgttgatcggaatcgaaatcttaaataccatacaatttatgcacgagcaaggatattctcacggagatattaaagcgagtaatatagtcttagatcaaatagataagaataaattatatctagtggattacggattggtttctaaattcatgtctaacggcgaacatgttccatttataagaaatccaaataaaatggataacggtactctagaatttacacctatagattctcataaaggatacgttgtatctagacgtggagatctagaaacacttggatattgtatgattagatggttgggaggtatcttaccatggactaagatatctgaaacaaagaattgtgcattagtaagtgccacaaaacagaaatatgttaacaatactgcaactttgttaatgaccagtttgcaatatgcacctagagaattgctgcaatatattaccatggtaaactctttgacatattttgaggaacccaattacgacaagtttcggcacatattaatgcagggtgtatattattaagtgtggtgtttggttgatgtaaaatttttgttgataaaaattaaaaaaataacttaatttattattgatctcgtgtgtacaaccaaaatcatggcgatgttttacgcacacgctctcggtgggtacgacgaaaatcttcatgcctttcctggaatatcatcgactgttgccaatgatgtcagaaaatattctgttgtgttagtttataataacaagtatgacattgtaaaagacaaatatatgtggtgttacagtcaggtgaacaagagatatattggagcactgttgcctatgtttgagtgcaatgaatatctacaaattggagatccgatccatgatcaagaaggaaatcaaatttctatcatcacataccgccacaaaaactactatgctctaagcggaatcgggtacgagagtctagacttgtgcttggaaggagtaaggattcatcatcacacacttgaagcaggaaacgctgtatatggaaaagttcaacatgattattctactatcaaagagaaggccaaagaaatgaatgcactcagttcaggacttatcatcgattaccacgtctggataggagattgtatctgtcaagttactgctgtagacgtacatggaaaggaaattatgagaatgagattcaaaaagggtgcggtgcttccgatcccaaatctggtaaaagttaaacttggggagaatgatacagaaaatctttcttctactatatcggcggcgccatcgaggtaaccacctctctggaagacagcgtgaataatgtactcatgaaacgtttggaaactatacgccatatgtggtctgttgtatatgatcattttgatattgtgaatggtaaagaatgctgttatgtgcatacgcatttgtctaatcaaaatcttataccgagtactgtaaaaacaaatttgtacatgaagactatgggatcatgcattcaaatggattccatggaagctctagagtatcttagcgaactgaaggaatcaggtggatggagtcccagaccagaaatgcaggaatttgaatatccagatggagtggaagacactgaattaattgagagattggtagaggagttcttcaatagatcaaaacttcaggctggtaaattagtcaaatttggtaattctattaattgttaaacatacatctgtttcagctaagcaactaagaacacgtatacggcagcagcttccttttatactctcatcttttaccaacacaaagggtggatatttgttcattggagttgataataatacacacaaagtatttggattcacggtgggttacgactacctcagactggtagagaatgatatagaaaagcatatcaaaagactttgtgttgtgcatttctgtgagaagaaagaggacatcaagtacacgtgtcgattcatcaaggtatataaacctggggatgagactacctcgacatacgtgtgcgctatcaaagtggaaagatgctgttgtgctgtgtttgcagattggccagaatcatggtatatggatactaatggtatcaataagtattctccagatgaatgggtgtcacatataaaattttaattaatgtaatagagaacaaataataaggttgtaatatcatatagacaataactaacaattaattagtaactgttatctcttttttaactaaccaactaactatatacctattaatacatcgtagttatagttcttaacatctattaatcattaattcgcttctttaattttttataaactaacattgttaattgaaaagggataacatgttacagaatataaattatatatggatttttttaaaaaggaaatacttgactggagtatatatttatctcttcattatatagcacgcgtgttttccaatttttccacatcccatataatacaggattataatctcgttcgaacatacgagaaagtggataaaacaatagttgattttttatctaggttgccaaatttattccatattttagaatatggggaaaatattctacatatttattctatggatgatgctaatacgaatattataattttttttctagatagagtattaaatattaataagaacgggtcatttatacacaatctcaggttatcatcatccattgatataaaagaatatgtatatcaattagttaataatgatcatccagataataggataagactaatgcttgaaaatggacgtagaacaagacattttttgtcctatatatcagatacagttaatatctatatatgtattttaataaatcatggattttatatagatgccgaagacagttacggttgtacattattacatagatgtatatatcactataagaaatcagaatcagaatcatacaatgaattaattaagatattgttaaataatggatcagatgtagataaaaaagatacgtacggaaacacaccttttattctattatgtaaacacgatatcaacaacgtggaattgtttgagatatgtttagagaatgctaatatagactctgtagactttaatagatatacacctcttcattatgtctcatgtcgtaataaatatgattttgtaaagttattaatttctaaaggagcaaatgttaatgcgcgtaatagattcggaactactccattttattgtggaattatacacggtatctcgcttataaaactatatttggaatcagacacagagttagaaatagataatgaacatatagttcgtcatttaataatttttgatgctgttgaatctttagattatctattatccagaggagttattgatattaactatcgtactatatacaacgaaacatctatttacgacgctgtcagttataatgcgtataatacgttggtctatctattaaacaaaaatggtgattttgagacgattactactagtggatgtacatgtatttcggaagcagtcgcaaacaacaacaaaataataatggaagtactattgtctaaacgaccatctttgaaaattatgatacagtctatgatagcaattactaaaaataaacaacataatgcagatttattgaaaatgtgtataaaatatactgcgtgtatgaccgattatgatactcttatagatgtacaatcactacagcaatataaatggtatattttaagatgtttcgatgaaatagatatcatgaagagatgttatataaaaaataaaactgtattccaattagttttttgtatcaaagacattaatactttaatgagatatggtaaacatccttctttcgtgaagtgcactagtctcgacgtatacggaagtcgtgtacgtaatatcatagcatctattagatatcgtcagagattaattagtctattatccaagaagctggatcctggagataaatggtcgtgttttcctaacgaaataaaatataaaatattggaaaactttaacgataacgaactgtccacatatctaaaaatcttataaacattattaaaatataaaatctaagtggataaaatcacactacatcattgtttccttttagtgctcgacagtgtatactatttttaacgctcataaataaaaatgaaaacgatttccgttgttacgttgttatgcgtactacctgctgttgtttattcaacatgtactgtacccactatgaataacgctaaattaacgtctaccgaaacatcgtttaataataaccagaaagttacgtttacatgtgatcagggatatcattcttcggatccaaatgctgtctgtgaaacagataaatggaaatacgaaaatccatgcaaaaaaatgtgcacagtttctgattacatctctgaactatataataaaccgctatacgaagtgaattccaccatgacactaagttgcaacggcgaaacaaaatattttcgttgcgaagaaaaaaatggaaatacttcttggaatgatactgttacgtgtcctaatgcggaatgtcaacctcttcaattagaacacggatcgtgtcaaccagttaaagaaaaatactcatttggggaatatatgactatcaactgtgatgttggatatgaggttattggtgctttgtacataagttgtacagctaattcttggaatgttattccatcatgtcaacaaaaatgtgatatgccgtctctatctaacggattaatttccggatctacattttctatcggtggcgttatacatcttagttgtaaaagtggttttacactaacggggtctccatcatccacatgtatcgacggtaaatggaatcccatactcccaacatgtgtacgatctaacgaaaaatttgatccagtggatgatggtcccgacgatgagacagatttgagcaaactctcgaaagacgttgtacaatatgaacaagaaatagaatcgttagaagcaacttatcatataatcatagtggcgttaacaattatgggcgtcatatttttaatctccgttatagtattagtttgttcctgtgacaaaaataatgaccaatataagttccataaattgctaccgtaaatataaatccgttaaaataattaataatttaataacaaacaagtatcaaaagattaaagacttatagctagaatcaattgagatgtctttttcagtggatgttgatatctacgatgccgttagagcatttttactcaggcactattataacaagagatttattgtgtatggaagaagtaacgccatattacataatatatacaggctatttacaagatgcgccgttataccgttcgatgatatagtacgtactatgccaaatgaatcacgtgttaaacaatgggtgatggatacactcaatggtataatgatgaatgaacgcgatgtttctgtaagcgttggcaccggaatactattcatggaaatgtttttcgattacaataaaataattcaaaaaatagtatcaacaatcaactaatgtatgatataattaatagcgtatctataattctagctaatgagagatatagaagcgcttttaacgacgatggtatatacatccgtagaaatatgattaacaagttgtacggatacgcatctctaactactattggcacgatcgctggaggtgtttgttattatctgttgatgcatctagttagtttgtataaataattatttcaatatactagttaaaattttaagattttaaatgtataaaaaactaataacgtttttatttgtaataggtgcattagcatcctattcgaataatgagtacactccgtttaataaactgagtgtaaaactctatatagatggagtagataatatagaaaattcatatactgatgataataatgaattggtgttaaattttaaagagtacacaatttctattattacagagtcatgcgacgtcggatttgattccatagatatagatgttataaacgactataaaattattgatatgtataccattgactcgtctactattcaacgcagaggtcacacgtgtagaatatctaccaaattatcatgccattatgataagtacccttatattcacaaatatgatggtgatgagcgacaatattctattactgcagagggaaaatgctataaaggaataaaatatgaaataagtatgatcaacgatgatactctattgagaaaacatactcttaaaattggatctacttatatatttgatcgtcatggacatagtaatacatattattcaaaatatgatttttaaaaatttaaaatatattatcacttcagtgacagtagtcaaataacaaacaataacaataacagacaacaaacaacaccatgagatatattataattctcgcagttttgttcattaatagtatacatgctaaaataactagttataagtttgaatccgtcaattttgattccaaaattgaatggactggggatggtctatacaatatatcccttaaaaattatggcatcaagacgtggcaaacaatgtatacaaatgtaccagaaggaacatacgacatatccgcatttccaaagaatgatttcgtatctttctgggttaaatttgaacaaggcgattataaagtggaagagtattgtacgggactatgcgtcgaagtaaaaattggaccaccgactgtaacattaactgaatacaacgaccatatcaatttgtacatcgagcatccgtatgctactagaggtagcaaaaagattcctatttacaaacgcggtgacatgtgtgatatctacttgttgtatacggctaacttcacattcggagattctaaagaaccagtaccatatgatatcgatgactacgattgcacgtctacaggttgcagcatagactttgtcacaacagaaaaagtgtgcgtgacagcacagggagccacagaagggtttctcgaaaaaattactccatggagttcgaaagtatgtctgacacctaaaaagagtgtatatacatgcgcaattagatccaaagaagatgttcccaatttcaaggacaaaatggccagagttatcaagagaaaatttaataaacagtctcaatcttatttaactaaatttctcggtagcacatcaaatgatgttaccacttttcttagcatgcttaacttgactaaatattcataactaatttttattaatgatacaaaaacaaaataaaactgcatattatacactggttaacgcccttataggctctaaccattttcaagatgaggtccctgattatagtccttctgttcccctctatcatctactccatgtctattagacgatgtgagaagactgaagaggaaacatggggattgaaaatagggttgtgtataattgccaaagatttctatcccgaaagaactgattgcagtgttcatctcccaactgcaagtgaaggattgataactgaaggcaatggattcagggatatacgaaacaccgataaattataaaaaagcaatgtgtccgctgtttccgttaataatactattttcgtaactggcggattattcataaataactctaatagcacgatcgtggttaacaatatggaaaaacttgacatttataaagacaaacaatggtcgattatagaaatgcctatggctagggtatatcacggcatcgactcgacatttggaatgttatattttgccggaggtctatccgttaccgaacaatatggtaatttagagaaaaacaacgagatatcttgttacaattctagaacgaataagtggtttgatatttcatatactatttataagatatccatatcatcattgtgtaaactaaataacgtcttctatgtatttagtaaggacattggatatgtggaaaagtatgatggtgcatggaagttagtacatgatcgtctccccgctataaaggcattatcaacttctccttattgattgaaaatgaaaatataaatagtttttatgtatagcagtattaccctatagttttattgcttactactaacatggatacagatacagatacagatacagatgttacaaatgtagaagatatcataaatgaaatagatagagagaaagaagaaatactaaaaaatgtagaaattgaaaataataaaaacattaacaagaatcatcccaatgaatatattagagaagcactcgttattaataccagtagtaatagtgattccattgataaagaagttatagaatgtatctgtcacgatgtaggaatatagatcatatctactaatttttataatcaatacaaaacataaaaaacaactcgttattacatagcaggcatggaatccttcaagtattgttttgataacgatggcaagaaatggattatcggaaatactttatattctggtaattcaatactatataaggtcagaaaaaatttcactagttcgttctacaattacgtaatgaagatagatcacaaatcacacaagccattgttgtctgaaatacgattctatatatctgtattggatcctttgactatcgacaactggacacgggaacgtggtataaagtatttggctattccagatctgtatggaattggagaaaccgatgattatatgttcttcgttataaagaattcgggaagagtattcgccccaaaggatactgaatcagtcttcgaagcatgcgtcactatgataaacacgttagagtttatacactctcgaggatttacccatggaaaaatagaaccgaggaatatactgattagaaataaacgtctttcactaattgactattctagaactaacaaactatacaagagtgaaaactcacatatagattacaacgaggacatgataacttcaggaaatatcaattatatgtgtgtagacaatcatcttggagcaacagtttcaaaacgaggagatttagaaatgttgggatattgcatgatagaatggttcggtggcaaacttccatggaaaaacgaaagtagtataaaagtaataaaacaaaaaaaagaatataaaaaatttatagctactttctttgaggactgttttcctgaaggaaatgaacctctggaattagttagatatatagaattagtatacacgttagattattctcaaactcctaattatgacagactacgtaaactgtttatacaagattgaaattatattctttttttatagagtgtggtagtgttacggatatctaatatttaatattagactatctctatcgcgctacacgaccaatatcgattactatggatatcttcagggaaatcgcatcttctatgaaaggagagaatgtatttatttctccagcgtcaatctcgtcagtattgacaatactgtattatggagctaatggatcaactgctgaacagctatcgaaatatgtagaaaaggaggagaacatggataaggttagcgctcaaaatatctcattcaaatccataaataaagtatatgggcgatattctgccgtgtttaaagattcctttttgagaaaaattggcgataagtttcaaactgttgacttcactgattgtcgcactatagatgcaatcaacaagtgtgtagatatctttactgaggggaaaatcaatccactattggatgaaccattgtctcctgatacctgtctcctagcaattagtgccgtatactttaaagcaaaatggttgacgccattcgaaaaggaatttaccagtgattatcccttttacgtatctccgacggaaatggtagatgtaagtatgatgtctatgtacggcaaggcatttaatcacgcatctgtaaaggaatcattcggcaacttttcaatcatagaactgccatatgttggagatactagtatgatggtcattcttccagacaagattgatggattagaatccatagaacagaatctaacagatacaaattttaagaaatggtgtgactttatggatgctatgtttatagatgttcacattcccaagtttaaggtaacaggctcgtataatctggtggatactctagtaaagtcaggactgacagaggtgttcggttcaactggagattatagcaatatgtgtaattcagatgtgagtgtcgacgctatgatccacaaaacgtatatagatgtcaatgaagagtatacagaagcagctgcagcaacttgtgcactggtgtcagactgtgcatcaacaattacaaatgagttctgtgtagatcatccgttcatctatgtgattaggcatgttgatggaaaaattcttttcgttggtagatattgctctccgacaactaattgttaaccattttttttaaaaaatagaaaaaacatgtggtattagtgcaggtcgttattcttccaattgcaattggtaagatgacggccaactttagtacccacgtcttttcaccacagcactgtggatgtgacagactgaccagtattgatgacgtcagacaatgtttgactgaatatatttattggtcgtcctatgcataccgcaacaggcaatgcgctggacaattgtattccacactcctctcttttagagatgatgcggaatcagtgttcatcgacattcgcgagctggtaaaaaatatgccgtgggatgatgtcaaagattgtgcagaaatcatccgttgttatataccggatgagcaaaaaaccatcagagagatttcggccatcatcggactttgtgcatatgctgctacttactggggaggtgaagaccatcccactagtaacagtctgaacgcattgtttgtgatgcttgagatgctaaattacgtggattataacatcatattccggcgtatgaattgatgagttgtacatcttgacattttcttctttcttctcttctcccttcctccctcttctccctttcccagaaacaaactttttttacccactataaaataaaatgagtatactacctgttatatttctttctatatttttttattcttcattcgttcagacttttaacgcgtctgaatgtatcgacaaagggcaatattttgcatcattcatggagttagaaaacgagccagtaatcttaccatgtcctcaaataaatacgctatcatccggatataatatattagatattttatgggaaaaacgaggagcggataatgatagaattataccgatagataatggtagcaatatgctaattctgaacccgacacaatcagactctggtatttatatatgcattaccacgaacgaaacctactgtgacatgatgtcgttaaatttgacaatcgtgtctgtctcagaatcaaatatagattttatctcgtatccacaaatagtaaatgagagatctactggcgaaatggtatgtcccaatattaatgcatttattgctagtaacgtaaacgcagatattatatggagcgggcatcgacgccttagaaataagagacttaaacaacggacacctggaattattaccatagaagatgttagaaaaaatgatgctggttattatacatgtgttttagaatatatatacggtggcaaaacatataacgtaaccagaattgtaaaattagaggtacgggataaaataataccttctactatgcaattaccagatggcattgtaacttcaataggtagtaatttgactattgcatgcagagtatcgttgagacctcccacaacggacaccgacgtcttttggataagtaatggtatgtattacaaagaagatgatggggacggaaacggtagaataagtgtagcaaataaaatctatatgaccgataagagacgtgttattacatcccggttaaacattaatcctgttaaggaaaaagatgctacaacgtttacgtgtatggcgtttactattcctagcatcagtaaaacagttactgttagtataacgtgaatgtatgttgttacatttccatgtcaattgagtttataagaatttttatacattatcttccaacaagcaattgacgaacgtattgctatgattaactcccacgatactatgcatattattaatcattaacttgcagactatacctagagctattttgacatactcgtgttcttgtgtaattgcagtatctatattattaaagtacgtaaatctagctatagttttattatttaattttagataatataccgtctccttatttttaaaaattgttacatcctttattaaatcattaatgggaatttctatgtcatagttaatatattgtgaacaacaagagcagatatctataggaaagggtggaatgcgatacattgatctatgtagttttaaaacacacgcaaactttgaagaatttatataaatcattccatcaatacatccttctatgttgagatgtatatatccaggaattcgtttattaatatcgggaaatgtataaactaaaacattgcccggaagcggagcttctaccggagttatatcagtttttaacttacaaaatgtaaccaatacctttgcatgacttgttttgttcggcaacgttagtttaaacttgacgaatggattaattacaatagcatgatccgcgcatctattaagtttttttactttaacgcccttgtatgtttttacagagactttatctaaatttctagtacttgtatgtgttataaatataacgggatatagaaccgaatcacctaccttagatacccaattacattttatcagatccagataataaacaaattttgtcgccctaactaattttatattgttatatattttacaattggttatgatatcatgtaataacttggaatctaacgcacatcgtcgtacgtttacacaattgtgatttagtgtagtatatctacacatgtatttttccgcgctatagtattctggactagtgataaaactatcgttatatctgtcttcgatgaactcatcgagatattgctctctgtcatatttatacacctgcataaactttctagacatcttacaatccgtgttattttaggatcatatttacatatttactggtataaagatgttagattagttaatgggaatcgtctataataatgaatattaaacaattatatgaggacttttaccacaaagcatcataaaaatgagtcgtcgtctgatttatgttttaaatatcaaccgcaaatcaactcataaaatacaagagaatgaaatatatacatattttagtcattgcaatatagaccatacttctacagaacttgattttgtagttaaaaactatgatctaaacagacgacaacatgtaactgggtatactgcactacactgctatttgtataataattactttacaaacgatgtactgaagatattattaaatcatgacgtaaatgtaacgatgaaaaccagtagcggacgtatgcctgtttatatattgcttactagatgttgcaatatttcacatgatgtagtgatagatatgatagacaaagataaaaaccacttattacatagagactattccaacatattactagagtatataaaatctcgttacatgttattaaaggaagaggatatcgatgagaacatagtatccactttattagataagggaatcgatcctaactttaaacaagacggatatacagcgttacattattattatttgtgtctcgcacacgtttataaaccaggtgagtgtagaaaaccgataacgataaaaaaggccaagcgaattatttctttgtttatacaacatggagctaatctaaacgcgttagataattgtggtaatacaccattccatttgtatcttagtattgaaatgtgtaataatattcatatgactaaaatgctgttgacttttaatccgaatttcaaaatatgtaataatcatggattaacgcctatactatgttatataacttccgactacatacaacacgatattcttgttatgttaatacatcactatgaaacaaatgttggagaaatgccgatagatgagcgtcgtataatcgtattcgagtttatcaaaacatattctacacgtccggcagattcgataacttatttgatgaataggtttaaaaatataaatatttatacccgctatgaaggaaagacattattacacgtagcatgtgaatataataatacacaagtaatagattatcttatacgtatcaacggagatataaatgcgttaaccgacaataacaaacacgctacacaactcattatagataacaaagaaaattccccatataccattaattgtttactgtatatacttagatatattgtagataagaatgtgataagatcgttggtggatcaacttccatctctacctatcttcgatataaaatcatttgagaaattcatatcctactgtatacttttagatgacacattttacaatagacacgttaggaatcgcaattctaaaacgtatcgatacgcattttcaaaatacatgtcgtttgataaatacgatggtataataactaaatgtcataaagaaacaatattgctcaaactatccactgttctagacactacactatatgcagttttaagatgccataattcgaaaaagttaagaagatacctcaacgagttaaaaaaatataataacgataagtcctttaaaatatattctaatattatgaatgagagataccttaatgtatattataaagatatgtacgtgtcaaaggtatatgataaactatttcctgttttcacagataaaaattgtctactaacattactaccttcagaaattatatacgaaatattatacatgctgacaattaacgatctttataatatattgtatccacctaccaaagtatagttgtatttttctcatgcgatgtgtgtaaaaaaactgatattatataaatattttagtgccgtataatgaagatgacgatgaaaatgatggtacatatatatttcgtatcattatcattattgttattgctattccacagttacgccatagacatcgaaaatgaaatcacagaattcttcaataaaatgagagatactctaccagctaaagactctaaatggttgaatccagcatgtatgttcggaggcacaatgaatgatatagccgctctaggagagccattcagcgcaaagtgtcctcctattgaagacagtattttatcgcacagatataaagactatgtggttaaatgggaaaggctagaaaaaaatagacggcgacaggtttctaataaacgtgttaaacatggtgatttatggatagccaactatacatctaaattcagtaaccgtaggtatttgtgtaccgtaactacaaagaatggtgactgtgttcagggtatagttagatctcatattaaaaaacctccttcatgcattccaaaaacatatgaactaggtactcatgataagtatggcatagacttatactgtggaattctttacgcaaaacattataataatataacttggtataaagataataaggaaattaatatcgacgatattaagtattcacaaacgggaaagaaattaattattcataatccagagttagaagatagtggaagatacaactgttacgttcattacgacgacgttagaatcaagaatgatatcgtagtatcaagatgtaaaatacttacggttataccgtcgcaagaccacaggtttaaactaatactagatccaaaaatcaacgtaacgataggagaacctgccaatataacatgcactgctgtgtcaacgtcattattgattgacgatgtactgattgaatgggaaaatccatccggatggcttataggattcgattttgatgtatactctgttttaactagtagaggcggtatcaccgaggcgaccttgtactttgaaaatgttactgaagaatatataggtaatacatataaatgtcgtggacacaactattattttgaaaaaacccttacaactacagtagtattggagtaaatacacaatgcatttttatatacattactgaataattattattattatttatatcgtatttgtgctatagaatgaatgaggatacgcgactatctaggtatttgtatctcactgatagagaacatataaatatagactctattaaacagttgtgtaaaatatcaaatcctaatgcatgttatagatgtggatgtacggctttacatgagtacttttataattatagatcagttaacggaaaatacaagtatagatacaacggttactatcaatattattcatctagcgattatgaaaattataatgaatattattatgatgattatgatagaactggtatgaacagtgagagtgagagcgagagtgataatatatcaatcaaaacagaatatgagaatgaatatgaattctatgatgaaacacaagatcaaagtacacaactagtaggttacgacattaaactcaaaaccaatgaggatgattttgtggatgaattttatggctatgatagatcagtgggtgtccatgattatatagatgaatcaattaataaagtagtatatggaagagagtctcacgtaagatggcgggatatatggcaagaacataatgatggcgtatacagtataggaaaggagtgcatagataatatatacgaagacaaccataccgtagacgaattctacaagatagacagcgtatcagatgtagatgacgcggaacacatatctccgataactaatgatgtatctacacaaacatgggaaaagaaatcagagttagatagatacatggaaatgtatcctcgtcatagatatagtaagcattctgtctttaagggattttctgacaaagttagaaaaaatgatttagacatgaatgtggtaaaagaattactttctaacggtgcatctctaacaatcaaggatagcagtaataaggatccaataaccgtttattttcgaagaacgataatgaatttagaaatgattgatattattaacaaacatacaactattgatgaacgaaagtatatagtacactcctatctaaaaaattataaaaatttcgattatccatttttcaggaagttagttttgactaataaacattgtctcaacaattattataatataagcgacagcaaatatggaacaccgctacatatattggcgtctaataaaaaattaataactcttaattacatgaagttattagtgtataacggaaatgatataaacgcacgaggtgaagatacacaaatgcgaactccattacacaaatatttgtgtaaatttgtatatcataatattgaatatggtgtccgatactataatgaaaagattatagacgcatttatagagttaggagccgatctaactattccaaataacgatggaatgataccagtagtttactgtatacactcaaatgcagaatatggttataacaatattactaacataaagataatacgtaaactacttaatcttagtagacgtgcgtcacataatctatttagagatcgagtcatgcacgattatataagtaatacatatattgatcttgagtgtttagatattattagatcgttggatggattcgatatcaatggttactttgaaggacgtacaccacttcattgcgctatacaacataacttcactcagattgctaagtacttattagatcgaggagctgatatatcattaaagacagacgatggtaaaactgtatttgatttatcgttatgtagttacatccctcttaaatggactagctttttgattagtcgtctaccgcctaaaagtgtcatatgctcactgactaaccatataatagattatgttcttacgaacaatagacgtattatttggcagagtcaaatgattaataagtacgtactgttactggacccatccttttattctagatttagaaatgctatcgaaagcaaattaaaccaacacgctaatcgttataataggttcgaacacgatagagatcgcgttaatgaaaattatgacaaagtcttacatgacatagacatatatattaaggatgtacaaatattaaaatctatttccatcactaataatataacactatacgatactattataaataagtcagagtttcctatacgtcgtgcaaatgacaaacaattaattaataaaataaaatccaatatatatcataatcttatcgaaaaagttattaaaaatgcattagagaaatgcactctgactaatgccgtcctcgagtatatgatgtcatctcgatctcaatcatcttatttgagtcgtattcctaatgagatattactcgaaatattatataaactcgacatgtacgatttacgtaatctatatacaagatatatgagagagaatgatatcacagagtatcatatagagaatacgaggtctgtttctacacagacatgaataatgaatacacactacaacgtttttttttaaaatcttagatataacactaaaattacatcaagattataatattgaaatcgtaatttgagttgtttgataatcatggatatcaaaaatgatatacgtaacattagcaatcttttagatgatgatatattatgcgatgtaatcataactatcggagatggagaagaaattaaggcgcataaaactatcttggctgccggatctacgtattttaaaacaatgttcacgacacctatgatagcgagagatctagtaactagagtaaatctacagatgtttgataaagatgtcgttaaaaatattgtacagtacttatacaataggcatataagttctatgaatgtaatagacgtattaaaatgcgccgactatcttctaatcaatgatctagtcactaactgtgaatcctatattaaagattatattaatcatgatatataccataagttatatgagatggttcatattccaatagtcaaatatattaaacgtatgctgataagtaatataccaacattgataactacgaacgcatttaaaaaaacagtatttgaaatattattcgatattatttctactaacgacagtgtatatttatacagagaaggatataaagtgacgatactattgaagtggctagaatacaactacatcaccgaagaacagctgttgtgtatactgtcctgtatagatatacaaaatctagataaaaagtctagactactactctattcgaataaaactataaatatgcatccttcgtgtatacaatttctattagataataaacagaatagaaacattataccccaccagttatgtttagcgtgtcatgatactaactataatgtatgtaacccgtgtatagtagtgtataacattaatactatggaatatagtgttatttccaccattcctaatcacataattaattacgcatccgcaattgtagataatgacataataatagctagaggatataactttaataatccatcattaaacaaggtatataaaataaacattgagaacaaaatacatgtagaactcccacccataataaaaaatagatgtcgtttttcattggctgtaatcgatgacacaatttatgctataggtggtcaaaacggtacgaacgtagaacgaactatagaatgttatacaatgggtgatgataagtggaagatgttacccaatatgcccatagcattatctagttatggcatgtgtgtattagatcaatacatatacattataggcggtcgtacccaacacattgattatacatcagtgcatacagtaaatagcatagatatggaggaggatacaaatatttcaaataaagttatgagatacgacactgtcaataatatatgggaaacattacctaacttctggactggaactataaatccaggcgtggtctcgcataaagatgatatatatgttgtatgcgacatcaaagatgaaaaaaatgttaaaacttgtatatttagatataacacgaatacgtataacggatgggaattggtcacgacgacagaaagcagattatcagctctgcatactattctttataacaataccataatgatgttacattgttatgaatcgtatatgttacaagatacatttaatgtgtacactcgcgaatggaatcatatgtgtcatcaacattcgaatagttatatcatgtacaatatactacccatctactaaatataatagaataaaataaatgagtatgatcattttagataacgattgattttatcattaccgcttcattcttatattctttgcttacggaacctatatttagaaacatctactaacgattttttatgcttgcattattaatggtatgtaatatgattgattgtgtacgcaataccaatttgttaagtatgaatacggggtacaaacataaactgaaatttaacattatttatttatgatatatatcgttatcgttatcgttatcgttatcgttatcgttattgtttggtctataccatggatatctttaaagaactaatcttaaaacacacggatgaaaatgttttgatttctccagtttctattttatctactttatctattctaaatcatggagcagctggttctacagctgaacaactatcaaaatatatagagaatatgaatgaaaatacacccgatgataagaaggatgacaataatgacatggacgtagatattccgtattgtgcgacactagctaccgcaaataaaatatacggtagcgatagtatcgagttccatgcctccttcctacaaaaaataaaagacgattttcaaactgtaaactttaataatgctaaccaaacaaaggaactaatcaacgaatgggttaagacaatgacaaatggtaaaattaattccttattgactagtccgctatccattaatactcgtatgacagttgttagcgccgtccattttaaagcaatgtggaaatatccattttctaaacatcttacatatacagacaagttttatatttctaagaatatagttaccagtgttgatatgatggtgggtaccgagaataacttgcaatatgtacatattaatgaattattcggaggattctctattatcgatattccatacgagggaaactctagtatggtgattatactaccggacgacatagaaggtatatataacatagaaaaaaatataacagatgaaaaatttaaaaaatggtgtggtatgttatctactaaaagtatagacttgtatatgccaaagtttaaagtggaaatgacagaaccgtataatctggtaccgattttagaaaatttaggacttactaatatattcggatattatgcagattttagcaagatgtgtaatgaaactatcactgtagaaaaatttctacatacgacgtttatagatgttaatgaggagtatacagaagcatcggccgttacaggagtatttatgactaacttttcgatggtatatagtacgaaggtctacataaaccatccatttatgtacatgattaaagacaacacaggacgtatactttttatagggaaatactgctatccgcaataaatataaacaaatagacttttatcacgtttatctatgtctaaatattacaaatagtaatagtataaactaaagctgataatacattaaaacttaaaaaaataataatatcatttacaattaatagtataaactaaaaattaaacaaatcgttattataagtaatatcaaaatgatgatatacggattaatagcgtgtcttatattcgtgacttcatccatcgctagtccactttatattcccgttattccacccattacggaagataaatcgttcaatagtgtagaggtattagtttccttgtttagagatgaccaaaaagactatacggtaacttctcagttcaataactacactatcgataccaaagactggactatcggcgtactatccacacctgatggtttggatataccattgactaatataacttattggtcacggtttactataggtcgtgcattgttcaaatcagagtctgaggatattttccaaaagaaaatgagtattctaggtgtttctatagaatgtaagaagtcgtcgacattacttacttttttgaccgtgcgtaaaatgactcgagtatttaatagatttccagatatggcttattatcgaggagactgtttaaaagccgtttatgtaacaatgacttataaaaatactaaaactggagagactgattacacgtacctctctaatgggggttgcctgcatactatcgtaatggggtcgatggttgattattgattagtatattccttattctttttattcacacaaaaagaacatttttataaacatgaaaccactgtctaaatgtaattatgatcttgatttatagatgaagatcagcctttagaggattttaaccagtatgtttaatatgaaaaaaataaacataacatattttgagattaagcgctattgtgcttaattattttgctctataaactgaatatatagccacaattattgacgggcttgtttatgaccggcaatcatgaatttacagaaattatctctggctatatatcttactgcgacatgttcgtggtgttatgaaacatgcataagaaaaactgcgttgtatcatgacattcaattggagcatgtagaagacaataaagatagtgtagcgtcgctaccgtacaagtatctacaagtagtcaatcaaagagaacgtagtagattgttggctacatttaattggacagatatagctgagggtgttagaaatgagttcattaaaatatgtgatatcaacggaacatatttatataattatactattgctgttagtataattattgattccacggaagaactaccaacagttactccaattacaacaacatatgaaccttctacatataattatactatcgatgatagcactgttattactactgaagaactacaagtaactccatcaccaactccaacatatgcacatgtaacaactcctcttccaacatcagcagttccttatgatcaacgatcgaataacaatgtaagcactatatctattcaggtactgagtaaaatattgggagtcaatgaaacagaattaactaattatcttattacgcataaaaatgccacggttgacaataacaccatggtcaatgatgaaacatctgacaataacacattgcatggtaatataggatttttggaaataaataattgttacaatgtttctgtatcagatgctagttttagaataacattagtaaacgatacttctgaagaaattttgctaatgctaacaggaactagttcatccaacacctttatatcttccaccaatatcactaaatgtttgaaaacattaatcaataatgcgtcaattaatgatgtacttataacacaaaatatgaatgtaacatctaattgtgataaatgctcaatgaatttgatggcatccgttattcctgcagttaatgaatttaacaatacgttgatgaaaattggtgtaaaaaatgatgaaaacaatacggtatataaatattataattgtaaactaactacaaattctacgtgtgatgagttaatcaatttagatgaagtcattaacaacataactctaacaaatattatacgcaatagtgtttcaataactaacagcaggaaaagacgagatttgaatggtgagtttgaattttccacttccaaggaattagattgtctttacaaatcatatggtgtaaacgaggatgtaagtcattgttttgcatcacctagacgtaaacgatctgacgacaaaaaggagtacatggacatgaaattattcgaccacgcgaaaaaagatttaagaatagacagtgttattcctaaaggtacaactcatttccaagtaggtacatctggtgcaagtggtggtgttgtaggagataggtccccatttcaaaatgttaaatcacgtgcaagtctattggcggaaaaaataatgcctagagtacctactactgctaccgaagagcagctatatgcaactgtaaataaacaaaccaagttgcctgcaggtgttaaaagtactccgtttacagaggctcttgtgtctacgataaaccaaaagctttctagtgctaaagaggtaacttatgcttcgctcaatctgccaggatcaagtggctatgttcatagaccatctgattctgttatttacagcagtataagacggtcacgtttacctagtgatagtgatagtgattatgaagatatacaaactgttgttaaggaatataatgaaagatatggtagaccagtcagtaaaacacagttatcaagtagtgaaagtgattttgaagatatagatactgttgttagagaaattaaacaacaaaaatatggtggagctagccgtgttagaacatcatcaagtagtagtgattttgaagatatgaatactgttgttagggaatatagacaaaaatatggcaatgcaatggcaaaaggacgtagtagttcccctaaacctgatccattatatagtactgttaagaaaacaactaaaagtctatcaggtggtgtagacatagttacaaaacaatcagactattctctattacctgacgttaatactggtagttctattgtgtcacctctcaccagaaaaggagctactagacgccctacaaatgatggtctacagagtccaaatcctcctccccgtaatccccgtcgaccacttcctcaacatgatgattattctcctccacaagttcctcagcgcgattattctcctccgcgcagacctccgccacttcctcctaaaccagtccaaaatccgccacgacttccccctagaccagcaggtcaattacctcctatagatcaaccagataaaggatttagtaagtttgtatcacctagacggtgtagaagagcaagctctggagtcatatgtggtatgatacaatcaaaaccaaacgatgatacctatttacttcttcaacggccaaaacttgaaccagaatatgcggaggtcggtaatggtatacccaagaacaatgttcctgtaataggtaataaacatagtaaaaaatatacatcggcgatgttaaaaatatcaacaaaatttgataaatctacggcatttggagcagcaatgttactaactggtcagcaggccattagccaacagactagatcaactgcgttaagtagaaaagatcagatgagcaatgaagaaaagatattcgaagcagttacaatgagtctatcaactataggttcaacgttgacgtctgcgggtatggcgggcggtccaaaactaatgattgcaggaatggctataacggctataactggtataatagatacgataaaagatatatattacctgttttcaggacaggagaggccggcagatcctgttattaaattatttaatacatacgctggcttattatccgatagtaataaaatgggggtaagaaaatgtttgacgcccggtgacgacacacttatttatattgcatacagaaacgatagcagttttaaacatagtacggatgcgatggctttgtatttcttagatgttatcgactcagagatcctatatctaaacacatcaaatttagttctagagtatcaactaaaggtggcttgtcccataggaacattaagatctgtagatgtggacataactgcgtatacaatattatatgatacagcggataatattaagaaatacaagtttatcagaatggcaacgctactatccaaacatccagttattagattgacatgtggtttagcagcaacattggtaattaaaccgtacgaggtacccattagtgatatgcaactactaaaaatggcgacgcctggtgaaccagaatccactaggtctataccatctgatgtctgtgataggtatcctctaaagaaattctatcttttggctggtggttgtccctatgatacatctcaaacttttattgtacatactacttgcagtattctactaaaaacagctacacgtgatcagtttagaaacagatgggtgttacaaaatccatttagacaagaaggggaatataagcaactgtttacctttagcaaatacgattttaacgacaccataatcgatcctaatggtgtggcgggtcatgctagcttttgtaccaataaaagcagcaaccaatgtttctggtccgaacctatgatattggaagatgtatcatcgtgtagttctagaactagaaaaatatacgtaaaactgggaatatttaatgctgaaggttttaatagttttgtactaaactgtccaactgggtctacacctacatacatcaaacataaaaatgcggacagtgacaatgttatcatagagctacctgtaggtgattacggcacagccaaattgtattcagcaacaaaaccgtcgaggatagctgtgttttgcacacataactatgataaacgattcaaatcagatattatagttctaatgtttaataaaatcagcggtgttccattttggagcatgtacacaggaagtgtaactagtagaaatagaatgtttaccacattgtctagaggaatgccgtttagatcaacgtattgcgataacagacgacgatcaggttgttattatgcaggaataccatttcatgaagatagtgtagaagcagatctacattatggaccaaaaataatgttaaaggaaacatatgacacaaacagtattgacccacgagttataacaaagtcaaagacgcactttcctagtccaataagtgtaaaattcatggctgacaatttaggaaatggatatgacaaccctaattcattttgggaagatgctaaaactaagaaacggacatatagtgcaatgacgataaaagttctaccatgtacagtgagaaataaaaatatagactttggatataactatggagatattatttctaatatggtttatctacaatctactagtcaggattatggagatggtaccaaatatacatttaaatccgtaactagatcagatcatgagtgtgaatctagcttagatctgacgtctaaggaagtaactgtgacatgtcctgcgtttagtataccaagaaatatatcaacgtatgaaggtctatgctttagtgttactacatctaaagatcattgtgctacaagtaataatgggttaaaatcttctggctatggaaaggaagatgctgttaaaccacgtgcctgctttcatcattggaattattacacactgtcgttggattattactgttcatacgaagatatttggagaagcaactggcctgactatgatccatgtaagtcatatatccatatagagtatagagatacatggatagaatctaacgtgttacagcaacctccttacacatttgaattcactcatgacaattctaacgaatatgtggataaagaaattagtaacaaattaaatgatctgtacaatgcatacaagaagattatggaatatagcgacggatcattgccggcgtctataaacagattagcaaaagcattgacttcagagggtagagaaatagcaagtgttaatatagatggtaatctgttagatatcgcatatcaagcagataaggaaaagatggccgacatacagacaaaaataaatgacatcaccagagacttatttatgcacactctatcagacaaagatataaaagacattatagaatccgaagaaggtaagagatgttgtataatagatgttaagaacaatcgtgttgaaaagtactatcctattgataattatctatgtggtactttagatgattatatatacacctctgtagaatataacaaatcctatgtgttagtaaacgatacttatatgagctacgactatcttgaatcatcaggtatagttgttctatcatgttatgaaatgactataatctccttggatacaaaagacgccaaagatgctatagaagatgtgatagtagcaagtgcggtagccgaagcattgaatgacatgtttaaggaatttgataaaaacgtaagtgctattataataaaagaagaagataattatctaaacagttcgccggatatctaccatataatatatatcataggtggcactattctgctactgttagtcattattttaatattggcaatttatatagcgcgcaataaatacaaaaccaggaaatataaaataatgaaatatgacaataggagcattaaatctgagcatcatgatagtcttgaaacagtgtctatggaaattattgataatcggtactaataaaatagtttaactcttttaaaaccagtttggtactggaatttcagttcattactcgttgagaaattgatgatttttttaaaatgatattacttttatatgcttgcatcgcagaatgatattcacaagtattattaaaaatgagtatcggtagttacattaccatatcatccatgctcatatggatctccatccattatataatcaatgatacatgtattaaaatactttccgaataagtcttttaaatattgtattaattatgaaaaactatgctatgcgagtatgatgcaaagatgtttaatgatacgatactagattttatctctagcgagagatgtcgttagaatcatttatcataactacgtttaataataattcatcaacgaatatcgataacatgtgtcatttatactttaaatacgttaaagtctgtccgtcttctctattgtttagactgtttgtagaatgctgtgatataaacaaactagtagaaggtacgactccgttacactgttatctaatgaatgaaggatttgaatcatctgttttaaaaaacctattaaaggagtatgtcatgaatacgtttaatgttcatgacagtgatggtcacattccattacacaaatatttaactcatgatgaagttgagaatgatatctttgatatgctttctgatagtatagatagctttagctaatataaaaatatattaatccactatatattctagacttgatttaaaaccgataaactactactacgtactgtataagttgttaaaaaaaggagcagaccctaattatgtagatgatagaggtaatacttttcttcattacttctgcatctatatgtccacttatgagaaaacgtcatttaataagatgcatcgtgaaaagaaatttattaaagagttggtaaaatatgaaaccgatattaataaagtaaataatataggaaatacacctctacataactacgtatctcaatatgatatcactctcattcctcatccacaacccattaaaaaaatggaaattaaagccctctattagcatagacggctacaggtctaccatcaggttaaccttcgtctacctttacaatggcctttccttgtgcccagttcagaccctgtcattgccacgctactaaggactccctgtataccgtggccgacgtcagacattgtctgactgaatacatcctgtgggtttctcatagatggacccatagagaaagcgcagggtctctctacaggcttctcatctctttcagaactgatgcaacggagctctttggtggtgagttgaaggagttctcggattcacttccgtgggacaatatcgacaattgcgtggagatcattaaatgtttcatcagaaatgactccatgaaaaccgccgaagaacttcgtgcaatcattggactttgtactcaatcagctatcgtctctggaagagtcttcaacgataagtatatcgacatactacttatgctgcgaaagattctgaacgaaaacgactatctcaccctcttggatcatatccgcactgctaaatactaaatctccttcatgctctctcactaatactcttactttctcactcactcactcactacactttttatcacacccaccttactttttatcatcttatgaggaatgattgccttcatcatttttcgtgaaatataatataggaataattagcaccagaatagctatggattgcgtcagagattgcacatgtattctatgtcgtctactggatgaagatgtgacgtacgaaaaaataaaactagaaattgaaacgtgtcacaacttatcaaaacatatagatagacgaggaaacaatgcgctacattgttacgtcttcaataaatgcgatacagacattaagattgttcggctgttactctctcgcggagtcgagagactttgtagaaacaacgaaggattaactccgctaggagtatacagtaagcatagatacgtcaaatctcaaattgtgcatctactgatatccagctattcgaattcctctaacaaactcaagtcgaatataaatgatttcgatctgtattcgtatatgtcttcggataatatcgacttacgtctgctaaaatacctaattgtggataaacggatacgtccgtccaagaatacgaattatgcaaacaatagtctcggattggtggatatatacgtaacgacgcctaatccgagaccagaagtattgctatggcttcttaaatcagaatgttacagcaccggttacgtatttcgtacctgtatgtacaacagtgatatgtgtaagaactctcttcattactatatatcgtctcatagagaatctcaatctcaatctctatccaaggatgtaattaaatgtttgatcaataacaatgtttccatccatggcagagacgaaggaggatctttacccatccaatactactggtctttctcaaccatagatatagagattgttaaattattattaataaaggatgtggacacgtgtagagtatacgacgacgtcagtcagccctatattagaggcgtattagcggattatctaaacaagcgatttagagtaaccccatataatgtagacatggaaatcgttaatcttcttattgagagacgtcatactcttgtcgacgtaatgcgtagtattacttcgtacgattccagagaatataaccactacatcattgataacattctaaagagatttagacaacaggatgaatccatcgtacaagccatgttgataaactacttacattacggcgatatggtaagtatacctatcgttcgatgcatgttagataacggagcgaccatggataagacaacggacaacaactatcctctcacgactactttgttaataataatctcgtcgatgtaaacgtcgtaaggtttatcgtggaaaatatggacacgcggctgtaaatcacatatctaacaatggccgtctatgtatgtacggtctgatattatcgagatttaataattgcgggtatcactgttatgaaaccatactaatagatgtatttgatatactaagcaagtacatggataatatagatatgatcgataatgagaataaaactctactatattacgcggtcgatgtcaataatatacaatttgcaaagcggttattggaatatggagcgagtgttacaacatcacgctcgataatcaatacggccatccagaaaagcagttaccaaagagaaaacaaaacgaggatagttgatttattacttagctaccatcccactctagagactatgattgacgcatttaatagagatatacgctatctatatcctgaaccattatcggcatgtatcagatacgccttaatcatagatgatgattttccttctaaagtaagtatgatatcgccggtcatcataaggaactaaagcgctatagagtagacattaatagaatgaagaatgcctacatatcaggcgtctccatgtttgatatattatttaaacgaagcaaacgccacagattgagatacgcaaagaatccgacatttataaactttgtatccaacatcaaatggtacaaaaaagaactaacgtccatcattacagaaactgtaaagaacaatgagaggatcgactccatagtggacaacattaatacagacgataacttgatttcgaaattacccatggagatacaactcgagatactttattactccattaaataatttatcatggagcgataatgtcctgtttcatttgtttccatgacatattacaaaatcgattccgtccaagatgataaaaacatttaccggcatcataaacacggagtttattttatatgtctcgcataaacattactaaaaaatatattgttcggttttctttttctttcacatctttaattatgaaaaagtaaatcattatgagatggatgaaatggacgagattgtacgcatcgttcgcgacagtatgtggtacatacctaacgtatttatggacgacggtaagaatgaaggtcacgtttctgtcaacaatgtttgtcatatgtattttacgttctttgatgtggatacatcgtctcatctgtttaagctagttattaaacactgcgatctgaataaacgactaaaatgtggtaactctccattacattgctatacgatgaatacacgatttaatccatctgtattaaagatattgttacaccacggcatgcgtaactttgatagcaaggatgaaaaaggacatattcctctacaccactatctgattcattcactatcaatcgataacaagatctttgatatactaacggacaccattgatgactttagtaaatcatccgatctattgctgtgttatcttagatataaattcaatgggagcttaaactattacgttctgtacaaattattgactaaaggatccgaccctaattgcgccgacgaggatgaactcacttctcttcattactactgtaaacacatatccacgttctacaaaagcaattattacaagtcaagtcacactaagatgcgagccgagaagcgattcatctacgcgataatagattatggagcaaacattaacgcggttacaaaaatcggaaatacgccgttacacacttaccttcaacagtataccaaacatagtcctcgtgtggtgtatgctcttttatctcgaggagccgatacgaggatacgtaataatcttgattgtacacccatcatggaatacataaagaacgattgtgcaacaggtcatattctcataatgttactcaattggcacgaacaaaaatacgggaaattacaaaaggaagaaggacaacatctactttatctattcataaaacataatcaaggatacggaagttacactctcaatatactacggtatctactaaataggttcgacattcagaaagacgaatactataataccatgactcctcttcataccgcctttcaaaattgtaacaacaatgttgcctcatacctcgtatacatcggatacgacatcaaccttccgactaaagacgataagacggtattcgacttggtgtttgaaaacagaaacatcatatacaaggcggatgttgtgaatgacatcatccaccacagactgaaagtatctctacctatgattaaatcgttgttttacaagatgtcagaattctctccctacgacgattactacgtaaaaaagatactagcctactgcctattaagggacgagtcattcgcggaactacatagtaaattctgtttaaacgaggactataaaagtgtatttatgaaaaatatatcattcgataagatagattccatcatcgaaaaatgcagtcgtgacataagtcgccttaaagagattcgaatctccgacaccgacctgtatacggtattaagaacagaagacatacggtatcacagctatcttaaagccatacattcagacagtcacatttcatttcccatgtacgacgatctcatagaacagtgccatctatcgatggagcgtaaaagtaaactcgtcgacaaagcactcaataaattagagtctaccatcgatggccaatctagactatcgtatttgcctccggaaattatgcgcaatatcataaccaagctaagcgactatcatctaaacagtatgttgtacggaaagaaccattacaaatattatccatgatagaaagaaaatatttaaaaaatatctatataattggagaagtaggaaacaagaacaagacaacgattactacattattaaattatgaagtccgtattatacttgtatatattgtttctctcatgtataataataaacggaagagatatagcaccgcatgcaccatccaatggaaagtgtaaagacaacgaatacaaacgccataatttgtgttgtttatcgtgtcctccgggaacatacgcttccagattatgcgatagcaagactaacacacaatgtacgccgtgtggttcgggtaccttcacatctcgcaataatcatttacccgcttgtctaagttgtaacggaagatgcgatagtaatcaggtagagacgcgatcgtgtaacactactcacaatagaatctgtgaatgctctcccggatattattgtcttctcaaaggatcatccggatgcaaggcatgtgtttcccaaacaaaatgtggaataggatacggagtatccggacacacgtctaccggagacgtcatctgttttccgtgtggtctcggaacatattctcacaccgtctcttccgcagataaatgcgaacccgtacccagaaatacgtttaactatatcgatgtggaaattaacctgtatccagttaacgacacatcgtgtactcggacgaccactaccggtctcagcgaatccatctcaacgtcggaactaactattactatgaatcataaagactgtaatcccgtatttcgtgaggaatacttctctgtccttaataaggtagcaacttcaggtttctttacaggagaaaatagatatcaaaatatttcaaaggtgtgcactctgaatttcgagattaaatgcaataacaaaaatttttcctccaaacagttaacgaaagcaaagaatgatgacggtatcatgccgcatttggagactgtaactctagtgggcgactgtctatctagcgtcgacatctatatactatatagtaataccaatactcaagactacgaaactgatacaatctcttatcatgtgggtaatgttctcgatgtcgatagccatatgcccggtagttgcaatatacataaactgatcactaattccaaacccacccactttttatagtaagtttttcacccataaataataaatacaataattaatttctcgtaaaagtagaaaatatattctaatttattgcacggtaaggaagtagaatcataaagaacagtactcaatcaatagcaattatgaaacaatatatcgtcctggcatgcatgtgcctggcggcagctgctatgcctgccagtcttcaatcattttcatcctcatcctcgtgtacggaagaagaaaacaaacatcatatgggaattgatgttattatcaaagtcacaaagcaagaccaaacaccgaccgatgataagatttgtcaatccgtaacggaagttacagagaccaaagacgatgaggtatccgaagaagttgtaaaaagagatcccaccacttattacagtatcgttggtgcgggtcttaacatgaactttggattcacaaaatgcccaaagattttatccatctctgaatcctctgacggaaacacggtgaatgctagattgtccagtgtgtccccaggacaaggtaaggactctcccgcgatcactcgtgaagaagctctggctatgatcaaagactgtgaggtgtctatcaacatcagatgtagcgaaaaagagaaagacagcgacatcaagacccatccagtactcgggtctaacatctctcataagaaagtgagttacgaagatatcatcggttcaacgatcgtcgatacaaaatgcgtcaaaaatctagagtttagtgttcgtatcggagacatgtgcaaggaatcatctgaacttgaggtcaaggatggatttaagtatgtcgacggatcggcatctaaaggtgcaaccgataatacttcactcatcgattcaacaaaactcaaagcgtgtgtctgaattgataactctattcatctgaaattggataagtagggttaatcgaacgattcaggcacaccacgaattaaaaaagtgtaccggacactatattccggtttgcaaaacaaaaatgttcttaactacattcacaaaaagttacatctcgttacttcttctttttctgtctcaatatgtgatacgatatgatcactattcctattcctattctctcttcgatggtctcataaaaaaagttttacaaaaatatttttattctctttctctcttcaatggtctcataaaaatattaaacctctttctgatgtttcaactatttcgtaaacgataacgtccaacaatatattctcgtagagattatcaatatccctatgcccatctaggttactagacaattgcatcataaaataatgtttataatttacacgttaacatcatataataaacgtatatagtataatattttttggcatataaatgatctagtaaaatccatataggggatactgctcacgttttttctttggtacaaaatttcacacaagtttttatacagacaaatattctcatccatatattttaaaacattaacttttgtactaagaaaaatattaaacctctttctgatggagtcgtaaaaaagttttatctctttctccttcgatggtctcacaaaaatattaaacctctttctgatggtctctataaagcgattgatttttcttaccctctagagtttcctacggtcgttggtcacacatttttttctagacactaaataaatagtaaaatttaataaa

SEQ ID NO: 50 - DNA, 40 bp, Horsepox virus
tttattaaattttactatttatttagtgtctagaaaaaaa

SEQ ID NO: 51 - DNA, 1349 bp, Horsepox virus
tttggctagtcaagatgatgaatcttcattatctgatatattgcaaatcactcaatatctagactttctgttattattattgatccaatcaaaaaataaattagaagccgtgggtcattgttatgaatctctttcagaggaatacagacaattgacaaaattcacagactttcaagattttaaaaaactgtttaacaaggtccctattgttacagatggaagggtcaaacttaataaaggatatttgttcgactttgtgattagtttgatgcgattcaaaaaagaatcctctctagctaccaccgcaatagatcctattagatacatagatcctcgtcgtgatatcgcattttctaacgtgatggatatattaaagttgaataaagtgaacaataattaattctttattgtcatcatgaacggcggacatattcagttgataatcggccccatgttttcaggtaaaagtacagaattaattagacgagttagacgttatcaaatagctcaatataaatgcgtgactataaaatattctaacgataatagatacggaacgggactatggacgcatgataagaataattttgaagcattggaagcaactaaactatgcgatgttttggaattaattacagatttctccgtgataggtatcgatgaaggacagttctttccagacattgttgaattctgtgagcgtatggcaaacgaagaaaaaatagttatagtagccgcactcgatgggacatttcaacgtaaaccgtttaataatattttgaatcttattccattatctgaaatggtggtaaaactaactgctgtgtgtatgaaatgctttaaggaggcttccttttctaaacgattgggtgaggaaaccgagatagagataataggaggtaatgatatgtatcaatcggtgtgtagaaagtgttacgtcggctcataatattatattttttatctaaaaaactaaaaataaacattgattaaattttaatataatacttaaaaatggatgttgtgtcgttagataaaccgtttatgtattttgaggaaattgataatgagttagattacgaaccagaaagtgcaaatgaggtcgcaaaaaaactaccgtatcaaggacagttaaaactattactaggagaattattttttcttagtaagttacagcgacacggtatattagatggtgccaccgtagtgtatataggatcggctcctggtacacatatacgttatttgagagatcatttctataatttaggaatgattatcaaatggatgctaattgacggacgccatcatgatcctattctaaatggattgcgtgatgtgactctagt

SEQ ID NO: 52 - DNA, 26 bp, Artificial Sequence
  Description of Artificial Sequence: Synthetic primer
cctattagatacatagatcctcgtcg

SEQ ID NO: 53 - DNA, 24 bp, Artificial Sequence
  Description of Artificial Sequence: Synthetic primer
cggtttatctaacgacacaacatc

SEQ ID NO: 54 - DNA, 18525 bp, Vaccinia virus
tagggataacagggtaatgaagaagctcttcgccagaagctagcaagaggtttaatatttttgtgagaccatcgaagagagaaagagaataaaaatattttatgactccattgaagagagaaagagaaaatgagaatgagaataaaaatattttagtgacaccatcagaaagaggtttaatatttttgtgagaccatcgaagagagaaagagaataaaaatattttatgactccattgaagagagaaagagaaaatgagaatgagaataaaaatattttagtgacaccatcagaaagaggtttaatattttttatgagaccatcaaagagagaaagagaataaaaatatttttgtaaaactttttttatgagaccatcaaagagagaaagagaataaaaatatttttgtaaaactttttttatgagaccatcaaagagagaaagagaataaaaatatttttgtaaaactttttttatgagaccatcaaagagagaaagagaataaaaatatttttgtaaaactttttttatgagaccatcaaagagagaaagagaataaaaatatttttgtaaaactttttttatgagaccatcaaagagagaaagagaataaaaatatttttgtaaaactttttttatgagaccatcaaagagagaaagagaataaaaatatttttgtaaaactttttttatgagaccatcaaagagagaaagagaataaaaatatttttgtaaaactttttttatgagaccatcagaaagaggtttaatatttttgtgataccctgaaaggaaataggaataggaataggaatagtgtcataatcgtatcacactattgagacagaaaaagaagaagtcgcgagaggtaactttttgtgaatgtagttaagaacatttttgttttgcaaaccggaatatagtgtccggtacacttttttaattcgtggtgtgcctgaatcgttcgattaaccctactcatccaatttcagatgaatagagttatcgattcagacacacgctttgagttttgttgaatcgatgagtgaagtatcatcggttgcaccttcagatgccgatccgtcgacatacttgaatccatccttgacctcaagttcagatgattccttgcacatgtctccgatacgaacgctaaactctagattcttgacgcattttgtatcgacgatcgttgaaccgatgatatcttcgtaactcactttcttatgagagatgttagacccgagtactggatgggtcttgatgtcgctgtctttctcttcttcgctacatctgatgtcgatagacacctcacagtctttgatcatagcaagagcttcttcatgagtgatcgcgggagagtccttaccttgtcctggggacacgctggacaatctagcattcactgtgtttccatcagcggattctgagatggatttaatctgaggacatttggtgaatccaaagttcattctcagacctccaccgatgatggagtaataagtggtaggaggatctacatcctcgactgatgtggaatcatcttctgattccacctcgggatctggatctgactcggactctgtaatttccgttacggattggcaaatcttatcattggtcggtgtttggtcttgctttgtgactttgataataacatcgattcccatatgatgtttgttttcttcttccgtacacgaggaggaggattgctgaagactggcaggcacatgcatgccaggacgatatattgtttcatgattgctattgattgattactgttctttatgattctacttccttaccgtgcaataaattagaatatattttctacttttacgagaaattaattattgtatttatgggtgaaaaacttactataaaaagcgggtgggtttggaattagtgatcagtttatgtatatcgcaactaccgggcatatggctatcgacatcgagaacattacccacatgataagagattgtatcagtttcgtagtcttgagtattggtattactatatagtatatagatgtcgacgctagatagacagtctccgaatgcggcatgatagtatcattctttgctttcgttaactgtttggaggaagaatctttgttattgcatttaatctcgaaattcagagtgcacacctttctcctgtaaagaaacctgaagttgctaccttattaaggacagagaagtatccatcacgaaagacgggatcgcagtctttatgattcatagtaatagttagttccgacgttgagatggattcgctgagaccggtagtggtcgtccgagtacacgatgtgtcgttaactggatacaggttaatttccacatcgatatagttaaacgtatttctgggtacgggttcgcatttatctgcggaagagacggtgtgagaatatgttccgagaccacacggagaacagatgacgtctccggatactccgtatcctattccacattttgtttgggaaacacatgccttgcatccggatgatcctttgagaagacaataatatccgggagagcattcacagattctattgtgagtagtgttacacgatcgcatcttccgttacaacttagacaagcgggtaaatgattattgcgagatgtgaaggtacccgaaccacacggcgtacattgtgtgttagtcttgctatcgcataatctggaagcgtatgttcccggacacaaattatggcgtttgtattcgttgtctttacactttccatcggatggtgcatgcggtgctatatctcttccgtttattattatacatgagagaaacaatatatacgagtataatacggacttcataatttaataatgtagtaatcgttgtcttgttcctgtttcctacttctccaatcatatagatattttctttctatcatggataatatttgtaatggttctttccgtacaacatactgtttagatgatattgcgcataatttccggaggcaaatacgatagtctagattggccatcgatggtagactctaatttattgagtgctttgtcgacgagtttacttttacgctccatcgatagatggcactgttctatgagatcgtcgtacatgggaaatgaaatgtgactgtctgaatgtatggctttaagatagctgtgataccgtatacaggtcggtgtcggagattcgaatctctttaaggcgacttatgtcacgatgatggaatctatcttatcgaatgatatatttttcataaatacacttttatagtcctcgtttaaacagaatttactatgtagttccgcgaatgactcgtcccttaataggcagtaggctagtatcttttttacgtagtaatcgtcgtagggagagaattctgacatcttgtagaacaacgatttaatcataggtactttcagtctgtggtggatgatgtcattcacaacatccgccttgtatatgatgtttctgttttcaaacaccaagtcgaataccgtctttagtcggaaggttgatgtcgtatccgatgtatgaggcaacattgttgttacaattttgaaaggcggtattataatattcgtctttctgaatgtcgaacctatctagtagataccgtagtatattgagagtgtatccttgattatgttttatgaatagataaagtagatgttgtccttcttccttttgttcgtgccaattgagtaacattatgagaatatgacctgttgcacaatcgttccatgatgggtgtacaatcaagattattacgtatcctcgagataaaagagcatacaccacacgaggactatgtttggtatactgttgaaggtaagtgtgtaacggcgttaatgtttgctccataatctattatcgcgtagatgaatcgcttctcggctcgcatcttagtgtgacttgacttgtaataattgcttttgtagaacgtggatatgtgtttacagtagtaatgaagagaagtgagttcatcctcgtcggcgcaattagggtcggatcctttgtacagaacgtaatagtttaagctcccattgaatttatatctaagataacacagcaatagatcggatgatttactaaagtcatcaatggtgtccgttagtatatcaaagatcttgttatcgattgatagtggtcatccttgctatcaaagttacgcatgccgtggtgtaacaatatctttaatacagatggattaaatcgtgtattcatcgtatagcaatgtaatggagagttacctcgtttattcagatcgcagtgtttaataactagcttaaacagatgagacgatgtatccacatcaaagaacgtaaaatacatatgacaaacattgttgacagaaacgtgaccttcattcttaccgtcgtccataaatacgttaggtatgtaccacatactgtcgcgaacgatgcgtacaatctcgtccatctcataatgatttactttttcataattaaagatgtgaaagaaaaccgaacaatatatttttttagtaatgtttatgcgagacatataaaataaactccgtgtttatgatgccggtaaatgtttttatcatcttggacggaatcgattttgtaatatgtcatggaaacaaatgaaacaggacattatcgctccatgataaattatttaatggagtaataaagtatctccatgggtaatttcgaaatcaagttatcgtctgtattaatgttgtccactatggagtcgatcctctcattgttctttacagtttctgtaatgatggacgttagttcttttttgtaccatttgatgtcggattctttgcgtatctcaatctgtggcgtttgcttcgtttaaataatatatcaaacatggagacgcctgatatgtaggcattcttcattctattaatgtctactctatagcgctttagttccttatgacgaccggcgatatcatactttactttagaaggaaaatcatcatctatgattaaggcgtatctgatacaggcgaataatggttcaggatatagatagcgtatatctctattaaatgcgtcaatcatagtctctagagtgggatggtagctaagtaataaatcaactagcttcgttttgttttctcttctgtaactacttttctggatggccgtattgattatcgagcgtgatgttgtaacactcgctccatattccaataaccgctttgcaaattgtatattattgacatcgaccgcgtaatatagtagagttttattctcattatcgatcatatctatattatccatgtacttgcttagtatatcaaatacatctattagtatggtttcataacagtgatacccgcaattattaaatctcgataatatcagaccgtacatacatagacggccattgttagatatgtgatttacagccgcgtgtccatattttccacgataaaccttacgacgtttacatcgacgagattattattaacaaagtagtcgtgcagaggatagttgttgtccgttatctaacatgcatcgaacgaccatatcgccgtaatgtaagtagtttatcaacatggcttgtacgatggattcatcctgttgtctaaatctctttagaatgttatcgatgatgtagtggttatattctctggaatcgtacgaagtaatactacgcattacgtcgacaagagtatgacgtctctcaataagaagattaacgatttccatgtctacattatatggggttactctaaatcgcttgtttagataatacgcctctaatatagggctgacgtcgtatactctacacgtgtccacatcctttattaataataatttaacaatctctatatctatggttgagaaagaccagtagtattggatgggtaaagatcctccttcgtctctgccatggatggaaacattgttattgatcaaacatttaattacatccttggatagagattgagattctctatgagacgatatatagtaatgaagagagttcttacacatatcactgttgtacatacaggtacgaaatacgtaaccggtgctgtaacattctgatttaagaagccatagcaatacttctggtctcggattaggcgtcgttacgtatatatccaccaatccgagaccattgattgcataattcgtattcttggacggacgtatccgtttatccacaattaggtattttagcagacgtaagtcgatattatccgaatacagatcgaaatcatttatattcgacttgagttcgttagaggaattcgaatagctggatatcagtagatgcacaatttgagatttgacgtatctatgcttactgtatactcctagcggagttaatccttcgttgtttctacaaagtctctcgactccgcgagagagtaacagtcgaacaatcttaatgtctgtatcgcatttattgaagacgtaacaatgtagcgcattgtttcctcgtctatctatatgttttgataagttgtgacacgtttcaatttctagttttatttttttgtacgtcacatcttcatccagtagacgacatagaatacatgtgcaatccatagctattctggtgctaattattcctatttcacgaaaaatgatgaaggcaatcattcctcataagatgataaaaagtgtagtgagagagcatgaaggagatttagtatttagcagtgcggatatgatccaagagggtgagatagtcgttctcgttcagaatctttcgcagcataagtagtatgtcgatatacttatcgttgaagactcttccagagacgatagctgattgagtacaaagtccaatgattgcacgaagttcttcggcggttttcatggagtcatttctgatgaaacatttaatgatctccacgcaattgtcgatattgtcccacggaagtgaatccttcaactcaccaccaaagagctccgttgcatcagttctgaaagagatgagaagcctgtagagaggccctgcagtttctctatgggtccatctatgagaaacccacaggatgtattcagtcagacaatgtctgacgtcggccacggtattcagggagtccttagtagcgtggcaatgacagggtctgaactgggcacaaggaaaggccattgtaaaggtagacctgtagccgtttatgctaatagagggctttaatttccatttttttaatgggttgtggatgaggaatgagagtgatatcatattgagatacgtagttatgtagaggtgtatttcctatattatttactttcggtttcatattttaccaactctttaataaatttcttttcacgatgcatcttattaaatgacgttttctcataagtggacatatagatgcagaagtaatgaagaaaagtattacctctatcatctgcataattagggtctgctccttttcttaacaacttatacagtacgtagtagtttatcggttttaaatcaagtctagaatatatagtggattaatatatttttatattagctaaagctatctatactatcagaaagcatatcattctcaacttcatcatgagttaaatatttgtgtaatggaatgtgaccatcactgtcatgacatactcctttaataggttttttaaaacagatgattcaaatccttcattcattagataacagtgtaacggagtcgtaccttctactagtttgtttatatcacagcattctacaaacagtctaaacaatagagaagacggacagactttaacgtataaatgacacatgttatcgatattcgttgatgaattattattaaacgtagttatgataaatgattctaacgacatctctcgctagagataaaatctagtatcgtatcattaaacatctttgcatcatactcgcatagcatagtttttcataattaatacaatatttaaaagacttattcggaaagtattttaatacatgtatcatcgatggagatccatatgaggagtcacttgtagttcttcagtagtaataacagtgctatcatcgatagtataattatatgtagaaggttcatatgttgttgtaattggagtaactgttggtagttcttccgtggaatcaataattatactaacagcaatagtataattatataaatatgttccgttgatatcacatattttaatgaactcatttctaacaccctcagctatatctgtccaattaaatgtagccaacaatctactacgttctctttgattgactacttgtacggtagcgacgctacactatctttattgtcttctacatgctccaattgaatgtcatgatacaacgcagtttttcttatgcatgtttcataacaccacgaacatgtcgcagtaagatatatagccagagataatttctgtaaattcatgattgccggtcataaacaagcccgtcaataattgtggctatatattcagtttatagagcaaaataattaagcacaatagcgcttaatctcaaaatatgttatgtttatttttttcatattaaacatactggttaaaatcctctaaaggctgatcttcatctataaatcaagatcataattacatttagacagtggtttcatgtttataaaaatgttctttttgtgtgaataaggaatatactaatcaataatcaaccatcgaccccattacgatagtatgcaggcaaccccccattagagaggtacgtgtaatcagtctctccagttttagtatttttataagtcattgttacataaacggcttttaaacagtctcctcgataataagccatatctggaaatttattaaatactcgagtcattttacgcacggtcaaaaaagtaagtaatgtcgacgacttcttacattctatagaaacacctagaatactcattttcttttggaaaatatcctcagactctgatttgaacaatgcacgacctatagtaaaccgtgaccaataagttatattagtcaatggtatatccaaaccatcaggtgtggatagtacgccgatagtccagtctttggtatcgatagtgtagttattgaactgagaagttaccgtatagtctttttggtcatctctaaacaaggaaactaatacctctacactattgaacgatttatcttccgtaatgggtggaataacgggaatataaagtggactagcgatggatgaagtcacgaatataagacacgctattaatccgtatatcatcattttgatattacttataataacgatttgtttaatttttagtttatactattaattgtaaatgatattattatttttttaagtattatcagctttagtttatactatttgtaatatttagacatagataaacgtgataaaagtctatttgtttatatttattgcggatagcagtatttccctataaaaagtatacgtcctgtgttgtctttaatcatgtacatgaatggatggtttatgtagaccttcgtacgatataccatcgaaaagttagtcataaatactcctgtaacggccgatgcttctgtatactcctcattaacatctataaacgtcgtatgtagaaatttttctacagtgatagtttcattacacatcttgctaaaatctgcataatatccgaatatattagtaagtcctaaattttctagaataggtaccagattatacggttctgtcatttccactttaaactttggcatatacaagtctatacttttagtagataacataccacaccattttttaaatttttcatctgttatatttttttctatgttatatataccttctatgtcgtccggtagtataatcaccatactagagtttccctcgtatggaatatcgataatagagaatcctccgaataattcattaatatgtacatattgcaagttattctcggtacccaccatcatatcaacgctggtaactatattcttagaaatataaaacttgtctgtatatgtaagatgtttagaaaatggatatttccacattgctttaaaatggacggcgctaacaactgtcatacgagtattaatggatagcggactagtcaataaggaattaattttaccatttgtcattgtcttaacccattcgttgattagttcctttgtttggttagcattattaaagtttacagtttgaaaatcgtcttttattttttgtaggaaggaggcatggaactcgatactatcgctaccgtatattttatttgcggtagctagtgtcgcacaatacggaatatctacgtccatgtcattattgtcatccttcttatcatcgggtgtattctcattcatattctctatatattttgatagttgttcagctgtagaaccagctgctccatgatttagaatagataaagtagataaaatggaaactggagaaatcaaaacattttcatcagggtgttttacgattagttctttaaagatatccatggtatagaccaaacaataacgataacgatatatatcataaataaataatgttaaatttcagtttatgtttgtaccccgtattcatacttaacaaattggtattacataccattaataatgcaagcataaaaaatcgttagtagatgtttctaaatataggttccgtaagcaaagaatataagaatgaagggtaatgataaaatcaatcgttatctaaaatgatcatactcatttattttattctattatattaacacatacatttttaacagcaacacattcaatattgtattgttatttttatattatttacacaattaacaatatattattagtttatattactgaattaataatataaaattcccaatcttgtcataaacacacactgagaaacagcataaacacagaatccatcaaaaatgtcgatgaaatatctgatgttgttgttcgctgctatgataatcagatcattcgccgatagtggtaacgctatcgaaacgacattgccagaaattacaaacgctacaacagatattccagctatcagattatgcggtccagagggagatggatattgtttacacggtgactgtatccacgctagagatatcgacggtatgtattgtagatgctctcatggttatacaggcattagatgtcagcatgtagtattagtagactatcaacgttcagaaaaaccaaacactacaacgtcatatatcccatctcccggtattatgcttgtattagtaggcattattattatgtgttgtctattatctgtttataggttcactcgacgaactaaactacctctacaagatatggttgtgccataatttttataaattttttttatgagtatttttacaaaaatgtataaagtgtatgtcttatgtatatttataaaaatgctaaatatgcgatgtatctatgttatttgtatttatctaaacaatacctctacctctagatattatacaaaaattttttatttcagcatattaaagtaaaatctagttaccttgaaaatgaatacagtgggtggttccgtatcaccagtaagaacataatagtcgaatacagtatccgattgagattttgcatacaatactagtctagaaagaaatttgtaatcatcttctgtgacgggagtccatatatctgtatcatcgtctagtttatcagtgtcccatgctatatttctgttatcatcattagttaatgaaaataactctcgtgcttcagaaaagtcaaatattgtatccatacatacatctccaaaactatcgcttatacgtttatctttaacgatacctatacctagatggttatttactaacagacattttccagatctattgactataactcctatagtttccacatcaaccaagtaatgatcatctattgttatataacaataacataactcttttccatttttatcagtatgtatatctatatcaacgtcgtcgttgtagtgaatagtagttattgatctattatatgaaacggatatgtctagaacggcaattgtcttacgtccagttaacactttctttgatttaaagtctagagtctttgcaaacataatatccttatccgactttatatttcctgtagggtggtataattttattttgcctccacatatcggtgtttccaaatatattactagacaatattccatatagttattagttaagggtacccaattagaacacgtacgcttattatcatcatttggatcgtatttcataaaagttattgtgttatcgatgtcaacacattctacattttttaatcgtctatatagtatttttctgatattttctataatatcagaattgtcttccatcggaagttgtatactatcggaatcagttacatgtttaaataattctctgatgtcattccttatacaatcaaattcattattaaacagtttaatagtctgtagacctttatcgtcgtaaatatccattgtcttattagttacgcttatttttatgtgtttttacgttgatttattatattttataagaatgattgtttgacgaatcacgagaactattaagacacattattaggtatatattataaaaaagtttttgattacgatgttataagaggaaagaggacacattaacatcatacatcaattaactacattcttataacatcgtaatcaaaagaattgcaattttgatgtataacaactgtcaatgggttatggaattgtatattacatattatacggtatgttggtaacgacaaataccgatcggtaattgtctgccggtgtaatagaattatatatatctatctattacaccggccttgtatacataataataagttgtggtagtatgatctccatatttataatttaggactttgtattcagtatttttggaatcataaaaaataaaaaaaagttttactaatttaaaatttaaaaagtatttacatttttttcactgtttagtcgcggatatggaattcgatcctgccaaaatcaatacatcatctatagatcatgtaacaatattacaatacatagatgaaccaaatgatataagactaacagtatgcattatccgaaatattatatcaatatcacaaaaataaatccacatttggctaatcaatttcgggcttggaaaaaacgtatcgccggaagggactatatgactaacttatctagagatacaggaatacaacaatcaaaacttactgaaactatacgtaactgtcaaaaaaatagaaacatatatggtctatatatacactacaatttagttattaattggataaccgatgtgattatcaatcaatattaagaaggttggtaaattggtacatagctaataatacctatacacccaataatacaacaaccatttctgagttggatatcatcaaaatactggataaatacgaggacgtgtatagagtaagtaaagaaaaagaatgtggaatttgctatgaagttgtttactcaaaacgatagatactttggtttattggattcgtgtaatcatatattttgcataacatgtatcaatatatggcataaaacacgaagagaaaccggtgcgtcggataattgtcctatatgtcgtacccgttttagaaacataacaatgagcaagttctataagctagttaactaataaataaaaagtttaatttgttgacgacgtatgtcgttatttttctcgtatgaaagattaaattcaattcaattcgttgtttctaatataatctgccgtattggatggattctcaagacaattgcatttagattatatcataaataaaaatagtagcacacaactacttcagcaaacattctttttataaatgccatctatcgtagtgaggacacaagtgaacctataatgagcaaatttattagtatcggttacatgaaggactttctgtagagtgacgattctaccatctatggtacgaacggtttcatcttctttgatgccatcacccagatgttctataaacttggtatcctcgtccgatctcatatcctttgccaaccaatacatgtagctaaaattaggcataaatttcacacatccagtgcaacgaaattctccagaagatgttacgatgtttaggttaggacatttgatttcgtcggcattaacatatgggtgaacacacccatacatgaaggcgatgagaaataggattctcatcttgccaaaatatcactagaaaaaatttatttatcaattttaaaggtataaaaaatacttattgttgctcgaatattttgtatttgatggtatacggaagattagaaatgtaggtattatcatcaactgattctatggttttatgtattctatcatgtttcactattgcgttggaaataatatcatatgcttccacatatattttattttgttttaactcataatactcacgtaattctggattattggcatatctatgaataattttagctccatgatcagtaaatattaatgagaacatagtattaccacctaccattatttttttcatctcattcaattcttaattgcaaagatctatataatcattatagcgttgacttatggactctggaatcttagacgatgtacagtcatctataatcatggcatatttaatacattgttttatagcatagtagttatctacgatgttagatatttctctcaatgaatcaatcacataatctaatgtaggtttatgacataatagcattttcagcagttcaatgtttttagattcgttgatggcaatggctatacatgtatatccgttatttgatctaatgttgacatctgaaccggattctagcagtaaagatactagagattgtttattatatctaacagccttgtgaagaagtgtttctcctcgtttgtcaatcatgttaatgtctttaagataaggtaggcaaatgtttatagtactaagaattgggcaagcataagacatgtcacaaagaccctttttgtatgtataagtgtaaaaattataacattcatagttggatttacataggtgtccaatcgggatctctccatcatcgagataattgatggcatctcccttccttttttagtagatatttcatcgtgtaagaatcaatattaatatttctaaagtatccgtgtatagcctctttatttaccacagttccatattccactagagggatatcgccgaatgtcatatactcaattagtatatgttggaggacatccgagttcattgttttcaatatcaaaaagatggtttccttatcatttctccatagtggtacaatactacacattattccgtgaggctttccattctccaaaaacaatttgaccaaatctacatctttattgtatctataatcactatttagataatcagccataattcctcgagtgcaacatgttagatcgtctatatatgaataagcagtgttatctattcctttcattaacaatttaacgatgtctatatctatatgagatgacttaatataatattgaagacctgtacaatagtttttatctataaaagacggcttgattccgtgattaattagacatttaacaacttccggacgcacatatgctctcgtatccgactttgaatacagatgcaatacggtaccgcaatttcgtagttgataatcatcatacgcgtatcagtactcgtcctcataaagaacactgcagccattttctatgaacaaatcaataattttaggaacaggatcattgtcattacataattttctataactgaacgatggttttcacatttaacactcaagtcaaatccatgttctaccaacacctttatcaagtcaacgtctacatttttggatttcatatagctgaatatattaaagtcatttatgttgctaaatccagtggcttctagtagagccatcgctatatcctttaactttaacatgtctactatttgtgtattcttctaatggggtagctgtctccaatttttgcgtaatggattagtgccactgtctagtagtagtttgacgacctcgacattattacaatgctcattaaaaaggtatgcgtgtaaagcattattcttgaattggttcctggtatcattaggatctctgtctctcaacatctgtttaagttcatcgagagccacctcctcattttccaaatagtcaaacattttgactgaatgagctactgtgaactctatacacccacacaactaatgtcattaaatatcatgtcaaaaacttgtacaattattaataaaaataatttagtgtttaaattttaccagttccagattttacacctccgttaaccccactggacgatcctcctccccacattccaccgccaccagatgtataagttttagatcctttattactaccatcatgtccatggataaagacactccacatgccgccactaccccctttagaagacatattaataagacttaaggacaagtttaacaataaaattaatcacgagtaccctactaccaacctacactattatatgattatagtttctatttttacagtaccttaactaaagtctctagtcacaagagcaatactaccaacctacactattatatgattatagtttctatttttataggaacgcgtacgagaaaatcaaatgtctaatttctaacggtagtgttgataaacgattatcgtcaatggatacctcctctatcatgtcgtctattttcttactttgttctattaacttattagcattatatattatttgattataaaacttatattgcttattagcccaatctgtaaatatcggattattaacatatcgtttctttgtaggtttatttaacatgtacatcactgtaagcatgtccgtaccatttattttaatttgacgcatatccgcaatttctttttcgcagtcggttataaattctatatatgatggatacatgctacatgtgtacttataatcgactaatatgaagtacttgatacatattttcagtaacgatttattattaccacctatgaataagtacctgtgatcgtctaggtaatcaactgttttcttaatacattcgatggttggtaatttactcagaataatttccaatatcttaatatataattctgctatttctggaatatatttatctgccagtataacacaaatagtaatacatgtaaacccatattttgttattatattaatgtctgtgccattatctattaaccattctactaggctgacactatgcgacttaatacaatgataaagtatactacatccatgtttatctattttgtttatatcattaatatacggcttacaaagttttagtatcgataacacatccaactcacgcatagagaaggtagggaataatggcataatatttattaggttatcatcattgtcattatttacaactaagtttccattttttaaaatatactcgacaactttaggatctctattgccaaatttttgaaaatatttatttatatgcttaaatctatataatgtagctccttcatcaatcatacatttaataacattgatgtatactgtatgataagatacatattctaacaatagatcttgtatagaatctgtatatcttttaagaattgtggatattaggatattattacgtaaactattacacaattctaaaatataaaacgtatcacggtcgaataatagttgatcaactatataattatcgattttgtgatttttcttcctaaactgtttacgtaaatagttagatagaatattcattagttcatgaccactatagttactatcgaataacgcgtcaaatatttcccgtttaatatcgcatttgtcaagataataatagagtgtggtatgttcacgataagtataataacgcatctctttttcgtgtgaaattaaatagtttatcacgtccaaagatgtagcataaccatcttgtgacctagtaataatataataatagagaactgttttacccattctatcatcataatcagtggtgtagtcgtaatcgtaatcgtctaattcatcatcccaattataatattcaccagcacgtctaatctgttctattttgatcttgtatccatactgtatgttgctacatgtaggtattcctttatccaataatagtttaaacacatctacattgggatttgatgttgtagcgtatttttctacaatattaataccatttttgatactatttatttctatacctttcgaaattagtaatttcaataagtctatatcgatgttatcagaacatagatattcgaatatatcaaaatcattgatatttttatagtcgactgacgacaataacaaaatcacaacatcgtttttgatattattatttttcttggtaacgtatgcctttaatggagtttcaccatcatactcatataatggatttgcaccactttctatcaatgattgtgcactgctggcatcgatgttaaatgttttacaactatcatagagtatcttatcgttaaccatgattggttgttgatgctatcgcattttttggtttctttctagggataacagggtaat

SEQ ID NO: 55 - DNA, 24931 bp, Vaccinia virus
tagggataacagggtaattgtttaaattttaccagttccagattttacacctccgttaaccccactggacgatcctcctccccacattccaccgccaccagatgtataagttttagatcctttattactaccatcatgtccatggataaagacactccacatgccgccactaccccctttagaagacatattaataagacttaaggacaagtttaacaataaaattaatcacgagtaccctactaccaacctacactattatatgattatagtttctatttttacagtaccttaactaaagtctctagtcacaagagcaatactaccaacctacactattatatgattatagtttctatttttataggaacgcgtacgagaaaatcaaatgtctaatttctaacggtagtgttgataaacgattatcgtcaatggatacctcctctatcatgtcgtctattttcttactttgttctattaacttattagcattatatattatttgattataaaacttatattgcttattagcccaatctgtaaatatcggattattaacatatcgtttctttgtaggtttatttaacatgtacatcactgtaagcatgtccgtaccatttattttaatttgacgcatatccgcaatttctttttcgcagtcggttataaattctatatatgatggatacatgctacatgtgtacttataatcgactaatatgaagtacttgatacatattttcagtaacgatttattattaccacctatgaataagtacctgtgatcgtctaggtaatcaactgttttcttaatacattcgatggttggtaatttactcagaataatttccaatatcttaatatataattctgctatttctggaatatatttatctgccagtataacacaaatagtaatacatgtaaacccatattttgttattatattaatgtctgtgccattatctattaaccattctactaggctgacactatgcgacttaatacaatgataaagtatactacatccatgtttatctattttgtttatatcattaatatacggcttacaaagttttagtatcgataacacatccaactcacgcatagagaaggtagggaataatggcataatatttattaggttatcatcattgtcattatttacaactaagtttccattttttaaaatatactcgacaactttaggatctctattgccaaatttttgaaaatatttatttatatgcttaaatctatataatgtagctccttcatcaatcatacatttaataacattgatgtatactgtatgataagatacatattctaacaatagatcttgtatagaatctgtatatcttttaagaattgtggatattaggatattattacgtaaactattacacaattctaaaatataaaacgtatcacggtcgaataatagttgatcaactatataattatcgattttgtgatttttcttcctaaactgtttacgtaaatagttagatagaatattcattagttcatgaccactatagttactatcgaataacgcgtcaaatatttcccgtttaatatcgcatttgtcaagataataatagagtgtggtatgttcacgataagtataataacgcatctctttttcgtgtgaaattaaatagtttatcacgtccaaagatgtagcataaccatcttgtgacctagtaataatataataatagagaactgttttacccattctatcatcataatcagtggtgtagtcgtaatcgtaatcgtctaattcatcatcccaattataatattcaccagcacgtctaatctgttctattttgatcttgtatccatactgtatgttgctacatgtaggtattcctttatccaataatagtttaaacacatctacattgggatttgatgttgtagcgtatttttctacaatattaataccatttttgatactatttatttctatacctttcgaaattagtaatttcaataagtctatatcgatgttatcagaacatagatattcgaatatatcaaaatcattgatatttttatagtcgactgacgacaataacaaaatcacaacatcgtttttgatattattatttttcttggtaacgtatgcctttaatggagtttcaccatcatactcatataatggatttgcaccactttctatcaatgattgtgcactgctggcatcgatgttaaatgttttacaactatcatagagtatcttatcgttaaccatgattggttgttgatgctatcgcattttttggtttctttcatttcagttatgtatggatttagcacgtttgggaagcatgagctcatatgatttcagtactgtagtgtcagtactattagtttcaataagatcaatctctagatctatagaatcaaaacacgataggtcagaagataatgaatatctgtaggcttcttgttgtactgtaacttctcgttttgttagatgtttgcatcgtgctttaacatcaatggtacaaattttatcctcgctttgtgtatcatattcgtccctactataaaattgtatattcagattatcatgcgatgtgtatacgctaacggtatcaataaacggagcacaccatttagtcataacagtaatccaaaattttttaaagtatatcttaacgaaagaagttgtgtcattgtctacggtgtatggtactagatcctcataagtgtatatatctagagtaatgtttaatttatcaaatggttgataatatggatcctcatgacaatttccgaagatggaaatgagatatagacacgcaataaatctaattgcggacatggttactccttaaaaaaatacgaataatcaccttggctatttagtaagtgtcatttaacactatactcatattaatccatggactcataatctctatacgggattaacggatgttctatatacggggatgagtagttctcttctttaactttatactttttactaatcatatttagactgatgtatgggtaatagtgtttgaagagctcgttctcatcatcagaataaatcaatatctctgtttttttgttatacagatgtattacagcctcatatattacgtaatagaacgtgtcatctaccttattaactttcaccgcatagttgtttgcaaatacggttaatcctttgacctcgtcgatttccgaccaatctgggcgtataatgaatctaaactttaatttcttgtaatcattcgaaataatttttagtttgcatccgtagttatcccctttatgtaactgtaaatttctcaacgcgatatctccattaataatgatgtcgaattcgtgctgtatacccatactgaatggatgaacgaataccgacggcgttaatagtaatttactttttcatctttacatattgggtactagttttactatcataagtttataaattccacaagctactatggaataagccaaccatcttagtataccacacatgtcttaaagtttattaattaattacatgttgttttatatatatcgctacgaatttaaacagagaaatcagtttaggaaaaaaaattatctatctacatcatcacgtctctgtattctacgatagagtgctactttaagatgcgacagatctgtgtcatcaaaaatatactccattaaaatgattattccggcagcgaacttgatattggatatatcacaacctttgttaatatctacgacaatagacagcagtcccatggttccataaacagtgagtttatctttctttgaagagatattttgtagagatcttataaaactgtcgaatgacatcgcatttatatctttagctaaatcgtatatgttaccatcgtaatatctaaccgcgtctatcttaaacgtttccatcgctttaaagacgtttccgatagatggcctcatttcatcagtcatactgagccaacaaatataatcgtgtataacatctttgatagaatcagactctaaagaaaacgaatcggctttattatacgcattcatgataaacttaatgaaaaatgtttttcgttggatgaatagtatgtcttaataattgttattattttcattaattaatatttagtaacgagtacactctataaaaacgagaatgacataactagttatcaaagtgtctaggacgcgtaattttcatatggtatagatcctgtaagcattgtctgtattctggagctattttctctatcgcattagtgagttcagaatatgttataaatttaaatcgaataacgaacataactttagtaaagtcgtctatattaactcttttattttctagccatcgtaataccatgtttaagatagtatattctctagttactacgatctcatcgttgtctagaatatcacatactgaatctacatccaattttagaaattggtctgtgttacatatctcttctatattattgttgatgtattgtcgtagaaaactattacgtagaccattttctttataaaacgaatatatagtactccaattatctttaccgatatatttgcacacataatccattctctcaatcactacatctttaagattttcgttgttaagatatttggctaaactatataattctattagatcatcaacagaatcagtatatatttttctagatccaaagacgaactctttggcgtcctctataatattcccagaaaagatattttcgtgttttagtttatcgagatctgatctgttcatatacgccatgattgtacggtacgttatgataaccgcataaaataaaaatccattttcatttttaaccaatactattcataattgagattgatgtaatactttgttactttgaacgtaaagacagtacacggatccgtatctccaacaagcacgtagtaatcaaatttggtgttgttaaacttcgcaatattcatcaatttagatagaaacttatactcatcatctgttttaggaatccatgtattattaccactttccattatcccaggctatgtttcgtccatcatcgttgcgcagagtgaataattcttttgtattcggtagttcaaatatataatccatgcatagatcggtaaagctattgtagatgtgatttttcctaaatctaatataaaactcgtttactagcaaacactttcctgatttatcgaccaagacacatatggtttctaaatctatcaagtggtggggatccatagttatgacgcagtaacatatattattacattcttgactgtcgctaatatctaaatatttattgttatcgtattggattctgcatatagatggcttgtatgtcaaagatatagaacacataaccaatttatagtcgcgctttacattctcgaatctaaagttaagagatttagaaaacattatatcctcggatgatgttatcactgtttctggagtaggatatattaaagtctttacagatttcgtccgattcaaataaattactaaataatatcccacattatcatctgttagagtagtatcattaaatctattatattttatgaaaaatatatcacttgctcacctctatatttcgtacatttttaaactgtttgtataatatctctctgatatatttattgtgtcggtagacgataccgttacatttgaattaatggtgttccattttacaacttttaacaagttgaccaattcatttctaatagtatcaaactctccatgattaaatattttaatagtatccattttatatcactacggacacaaagtagctgacataaaccattgtataatttttatgttttatgtttattagcgtacacattttggaagttccggctgccatgtatttcctggagagcaagtagatgatgaggaaccagatagtttatatccgtacttgcacttaaagtctacattgtcgttgtatgagtatgatcttttaaacccgctagacaagtatccgtttgatattgtaggatgtggacatttaacaatctgacacgtgggtggatcggaccattctcctcctgaacacaggacaccagagttaccaatcaacgaatatccactattgcaactataagttacaacgctcccatcggtataaaaatcctcgtatccgttatgtcttccgttggatatagatggaggggattggcatttaacagattcacaaataggtgcctcgggattccataccatagatccagtagatcctaattcacaatacgatttagattcaccgatcaaatgatatccgctattacaagagtacgttatactagagccaaagtctactccaccaatatcaagttggccattatcgatatctcgaggcgatgggcatctccgtttaatacattgattaaagagtgtccatccagtacctgtacatttagcatatataggtcccattttttgctttctgtatccaggtagacatagatattctatagtgtctcctatgttgtaattagcattagcatcagtctccacactattcttaaatttcatattaatgggtcgtgacggaatagtacagcatgatagaacgcatcctattcccaacaatgtcaggaacgtcacgctctccaccttcatatttatttatccgtaaaaatgttatcctggacatcgtacaaataataaaaaagcccatatatgtttgctattgtagaaattgtttttcacagttgctcaaaaacgatggcagtgacttatgagtttcatctttagtaaacatatcataatattcgatattacgagttgacatatcgaacaaattccaagtatttgattttggataatattcgtattttgcatctgctataattaagatataatcaccgcaagaacacacgaacatctttcctacatggttaaagtacatgtacaattctatccatttgtcttccttaactatatatttgtatagataattacgagtctcgtgagtaattccagtaattacatagatgtcgccgtcgtactctacagcataaactatactatgatgtctaggcatgggagacttttttatccaacgatttttagtgaaacattccacatcgtttaatactacatatttttcatacgtggtataaactccacccattacatatatatcatcgtttacgaataccgacgcgcctgaatatctaggagtaattaagtttggaagtcttatccatttcgaagtgccgtgtttcaaatattctgccacacccgttgaaatagaaaattctaatcctcctattacatataactttccatcgttaacacaagtactaacttctgattttaacgacgacatattagtaaccgttttccattttttcgttttaagatctacccgcgatacggaataaacatgtctattgttaatcatgccgccaataatgtatagacaattatgtaaaacatttgcattatagaattgtctatctgtattaccgactatcgtccaatattctgttctaggagagtaatgggttattgtggatatataatcagagtttttaatgactactatattatgttttataccatttcgtgtcactggctttgtagatttggatatagttaatcccaacaatgatatagcattgcgcatagtattagtcataaacttgggatgtaaaatgttgatgatatctacatcgtttggatttttatgtatccactttaataatatcatagctgtaacatcctcatgatttacgttaacgtcttcgtgggataagatagttgtcagttcatcctttgataattttccaaattctggatcggatgtcaccgcagtaatattgttgattatttctgacatcgacgcattatatagttttttaattccatatcttttagaaaagttaaacatccttatacaatttgtggaattaatattatgaatcatagtttttacacatagatctactacaggcgtaacatcaattattacggcagcaactagtatcatttctacattgtttatggtgatgtttatcttcttccagcgcatatagtctaatagcgattcaaacgcgtgatagtttataccattcaatataatcacttcatcatttatatggtgctcctgaatgcgtttaaaaaaattatacggagacgccgtaataatttccttattcacttgtataatttccccattgatagaaaatatcacgctttccattcttgaagtactataagtaattatagtataatgtaaaggtttatatattcaatattttttataaaaaaatcatttcgacattaattcctttttaaatttccgtctatcatctatagaaacgtattctatgaatttataaaatgcttttacgtgtcctatcgtaggcgatagaaccgctaaaaagcctatcgaatttctacaaaagaatctgttatatggtatagggagagtataaaacattaaatgcccgtacttattaaagtattcagtagccaatcctaactctttcgaatacttattaatggctcttgttctgtacgaatctatttttttgaacaacggacctagtggtatatcttgttctatgtatctaaaataatgtctgactagatccgttagtttaatatcctcagtcatcttgtctagaatggcaaatctaactgcgggtttaggctttagtttagtttttatatctacatctatgtctttatctaacaccaaaaatataatagctaatattttattacaatcatccggatattcttctacgatctcactaactaatgtttctttggttatactagtatagtcacgatcagacaaataaagaaaatcagatgatcgatgaataatacatttaaattcatcatctgtaagatttttgagatgtctcattaaaatattattagggttagtactcattatcattcggcagctattacttattttattatttttcaccatatagatcaatcattagatcatcaaaatatgtttcaatcatcctaaagagtatggtgaatgactcttcccatctaatttctgaacgttcaccaatgtctctagccactttggcactaatagcgatcattcgcttagcgtcttctatattattaactggttgattcaatctatctagcaatggaccgtcggacagcgtcattctcatgttcttaatcaatgtacatacatcgccgtcatctaccaattcatccaacaacataagctttttaaaatcatcattataataggtttgatcgttgtcatttctccaaagaatatatctaataagtagagtcctcatgattagttaacaactattttttatgttaaatcaattagtacaccgctatgtttaatacttattcatattttagtttttaggattgagaatcaatacaaaaattaatgcatcattaattttagaaatacttagtttccacgtagttaatgaaacatttgaactcatcgtacaggacgttctcgtacaggacgtaactataaaccggtttatatttgttcaagatagatacaaatccgataacttttttgacgaattctacgggatccactttaaaagtgtcataccgggttctttttatttttttaaacagatcaatggtgtgatgttgattaggtcttttacgaatttgatatagaatagcgttcacatatcctccataatggtcaatcgccatttgttcgtatgtcataaattctttaattatatgacactgtgtattgtttagttcatccttgttcattgttaggaatctatccaaaatggcaattatactagaactataggtgcgttgtatacacatattgatgtgtctgtttatacaatcaatgatatttggatccatgctactaccttcgggtaaaattgtagcatcatataccatttctagtactttaggttcattattatccattgcagaggacgtcatgatcgaatcataaaaaaatatattatttttatgttattttgttaaaaataatcatcgaatacttcgtaagatactccttcatgaacataatcagttacaaaacgtttatatgaagtaaagtatctacgatttttacaaaagtccggatgcataagtacaaagtacgcgataaacggaataataatagatttatctagtctatctttttctatagctttcatagttagatacatggtttcagaagtaggattatgtaacatcagcttcgataaaatgactgggttatttagtcttacacattcgctcatacatgtatgaccgttaactacagagtctacactaaaatgattgaacaatagatagtctaccattgttttgtattcagatagtacagcgtagtacatagcatcttcacaaattatatcattgtctaatagatatttgacgcatcttatggatcccacttcaacagccatcttaaaatcatattgctttcctttatcattaataatttctagaacatcatctctatcataaaagatacaaatattaactgtttgatccgtaataacattgctagtcgatagcaatttgttaataagatgcgctaggctcaatgtcttaataagaagtgtaagaggactatctccgaatttgttttgtttattaacatccgttgatggaagtaaaagatctataatgtctacatacttaactgttttagagcatacaatatggagaggtgtatttccatcatgatctggttttgagggactaattcctagtttcatcatccatgagattgtagaagcttttggattgtctgacataagatgtctatgaatatgatttttgccaaatttatccactatcctggcttcgaatccgatggacattatttttttaaacactctttctgaaggatctgtacacgccaacaacggaccacatccttcttcatcaaccgagttgttaatcttggctccatactgtaccaataaatttattctctctatgacttcatcatctgttcccgagagataatatagaggtgttttattatgtttatcacacgcgtttggatctgcgccgtgcgtcagcagcatcgcgactattctattattattaattttagaagctatatgcaatggataatttccatcatcatccgtctcatttggagagtatcctctatgaagaagttcttcgacaaatcgttcatctagtcctttaattccacaatacgcatgtagaatgtgataattatttccagaaggttcgatagcttgtagcatattcctaaatacatctaaatttttactattatatttggcataaagagatagataatactcggccgacataatgttgtccattgtagtataaaaattaatatttctatttctatttctgtatatttgcaacaatttactctctataacaaatatcataacttagttcttttatgtcaagaaggcactggtttagttcatctataaatgtcacgccataactaccacgcatgccatactcagaattatgataaagatatttatccttggggtgtaggtaatggggattaatctttgttggatcagtctctaagttaacacatgtcacacatgatccatttatagttatatcacacgatgatgatttatgaattgattccggaagatcgctatcgtattttgtggttccacaattcatttccatacatgttattgtcacactaatattgtgatgaactttatctagccgctgagtggtaaacaacagaacagatagtttattatctttaccaacaccctcagccgctgccacaaatctctgatccgtatccatgatggtcatgtttatttctagtccgtatccagtcaacactatgttagcatttctgtcgatatagctttcactcatatgacactcaccaataatagtagaattaatgtcataatttacaccaatagtgagttcggcggcaaagtaccaataccggtaatcttgtcgaggaggacatatagtattcttgtattctaccgaatacccgagagatgcgatacaaaagagcaagactaatttgtaaaccatcttactcaaaatatgtaacaatagtacgatgcaatgagtaagacaataggaaatctatcttatatacacataattattctatcaattttaccaattagttagtgtaatgttaacaaaaatgtgggagaatctaattagtttttctttacacaattgacgtacatgagtctgagttccttgtttttgctaattatttcatccaatttattattcttgactatatcgagatcttttgtataggagtcagacttgtattcaacatgcttttctataatcattttagctatttcggcatcatccaatagtacattttccagattagcagaatagatattaatgtcgtatttgaacagagcctgtaacatctcaatgtctttattatctatagccaatttaatgtccggaatgaagagaagggaattattggtgtttgtcgacgtcatatagtcgagcaagagaatcatcatatccacgtgtccattttttatagtgatgtgaatacaactaaggagaatagccagatcaaaagtagatggtatctctgaaagaaagtaggaaacaatacttacatcattaagcatgacggcatgataaaatgaagttttccatccagttttcccatagaacatcagtctccaatttttcttaacaaacagttttaccgtttgcatgttaccactatcaaccgcataatacaatgcggtgtttcccttgtcatcaaattgtgaatcatccagtccactgaatagcaaaatctttactattttggtatcttccaatgtggctgcctgatgtaatggaaattcattctctagaagatttttcaatgctccagcgttcaacaacgtacatactagacgcacgttattatcagctattgcataatacaaggcactatgtccatggacatccgccttaaatgtatctttactagagagaaagcttttcagctgcttagacttccaagtattaattcgtgacagatccatgtctgaaacgagacgctaattagtgtatattttttcattttttataattttgtcatattgcaccagaattaataatatctctaatagatctgattagtagatacatggctatcgcaaaacaacatatacacatttaataaaaataatatttattaagaaaattcagatttcacgtacccatcaatataaataaaataatgattccttacaccgtacccatattaaggagattccaccttacccataaacaatataaatccagtaatatcatgtctgatgatgaacacaaatggtgtattaaattccagtttttcaggagatgatctcgccgtagctaccatgatagtagatgcctctgctacagttccttgttcgtcgacatctatctttgcattctgaaacattttataaatatataatgggtccctagtcatatgtttaaacgacgcattatctggattaaacatactaggagccatcatttcggctatcgacttaatatccctcttattttcgatagaaaatctagggagtttaagattgtacactttattccctaattgaaacgaccaatagtctaattttgcagccgtaatagaatctgtgaaatgggtcatattatcacctattgccaggtacatactaatattagcatccttatacggaaggcgcaccatatcatattcttcgtcatcgattgtgattgtatttccttgcaatttagtaactacgttcatcatgggaaccgttttcgtaccgtacttattagtaaaactagcattgcgtgttttagtgatatcaaacggatattgccatatacctttaaaatatatagtattaatgattgcccatagagtattattgtcgagcatattagaatctactacattagacataccggatctacgttctactatagaattaattttattaaccgcatctcgtctaaagtttaatctatataggccgaatctatgatattgttgataatacgacggtttaatacacacagtattatctacgaaactttgataagttagatcagtgtacgtatatttagatgttttcagcttagctaatcctgatattaattctgtaaatgctggacccagatctctttttctcaaatccatagtcttcaataattctattctagtattacctgatgcaggcaatagcgacataaacatagaaaacgaataaccaaacggtgagaagacaatattatcatcttgaatatttttatacgctactataccggcattggtaaatccttgcagacgataggtagacactgaacacgttaacgatagtatcaataacgcaatcatgattttatggtattaataattaaccttatttttatgttcggtataaaaattattgatgtctacacatccttttgtaattgacatctatatatccttttgtataatcaactctaatcactttaacttttacagttttccctaccagtttatccctatattcaacatatctatccatatgcatcttaacactctccgccaagatagcttcaaagtgaggatagtcaaaaagataaatatatagagcataatcattctcgtatactctgccctttattacatcacccgcattgggcaacgaataacaaaatgcaagcatcttgttaacgggctcgtaaattgggataaaaattatgtttttatatctattttattcaagagaatattcaggaatttctttttccggttgtatctcatcgcagtatatatcatttgtacattgtttcatattttttaatagtttacaccttttagtaggactagtatcgtacaattcatagctgtattttgaattccaatcacgcataaaaatatcttccaattgttgacgaagacctaatccatcatccggtgtaatattaatagatgctccacatgtatccgtaaagtaatttcctgtccaatttgaggtacctatataggccgttttatcggttaccatatatttggcatggtttaccctagaatacggaatgggaggatcagcatctggtacaataaatagctttacttctatatctatgtttttagattttagcatagcgatagatcttaaaaagtttctcatgataaacgaagatcgttgccagcaactaatcaatagcttaacggatacttgtctgtctatagcggatcttcttaattcatcttctatataaggccaaaacaaaattttacccgccttcgaataaataatagggataaagttcataacagatacataaacgaatttactcgcatttctaatacatgacaataaagcggttaaatcattggttctttccatagtacatagttgttgcggtgcagaagcaataaatacagagtgtggaacaccacttacgttaatactaagaggatgatctgtattataatacgacggataaaagtttttccaattatatggtagattgttaactccaagataccagtatacctcaaaaatttgagtgagatccgctgccaagttcctattattgaagatcgcaatacccaattctttgacctgagttagtgatctccaatccatgttagcgcttcctaaataaatatgtgtattatcagatatccaaaattttgtatgaagaactcctcctaggatatttgtaatatctatgtatcgtacttcaactccggccatttgtagtctttcaacatcctttaatggtttgttagatttattgacggctactctaactcttactcctcttttgggtaattgtacaatctcgtttaatattatcgtgccgaaattcgtacccacttcatccgataaactccaataaaaagatgatatatctagtgtttttgtggtattggatagaatttccctccacatgttaaatgtagacaaatatactttatcaaattgcatacctataggaatagtctctgtaatcactgcgattgtattatccggattcattttatttgttaaaaaataatcctatatcacttcactctattaaaaatccaagtttctatttctttcatgactgattttttaacttcatccgtttccttatgaagatgatgtttggcaccttcataaatttttatttctctattacaatttgcatgttgcatgaaataatatgcacctgaaacatcactaatctcattgtttgttccctggagtatgagagtcggggggtgttaatcttggaaattatttttctaaccttgttggtagccttcaagacctgactagcaaatccagccttaattttttcatgattgattaatgggtcgtattggtatttataaactttatccatatctctagatactgattctggacatagctttccgactggcgcatttggtgtgatggttcccataagtttggcagctagcagattcagttttgaaacagcatctgcattaactagaggagacattagaatcattgctgtaaacaagtttggattatcgtaagaggctagtatagaaattgttgctcccatggaatgacccaataagtagatttaatagttaccacgtgctgtaccaaagtcatcaatcatcattttttcaccattacttcttccatgtccaatatgatcatgtgagaatactaaaattcctaacgatgatatgttttcagctagttcgtcataacgtccagaatgtttaccagctccatgacttatgaatactaatgccttaggatatgtaataggtttccaatatatgtaatcattgtccagattgaacatacagtttgcactcatgattcacgttatataactatcaatattaacagttcgtttgatgatcatattatttttatgttttattgataattgtaaaaacatacaattaaatcaatatagaggaaggagacggctactgtcttttgtgagatagtcatggcgactaaattagattatgaggatgctgttttttactttgtggatgatgataaaatatgtagtcgcgactccatcatcgatctaatagatgaatatattacgtggagaaatcatgttatagtgtttaacaaagatattaccagttgtggaagactgtacaaggaattgatgaagttcgatgatgtcgctatacggtactatggtattgataaaattaatgagattgtcgaagctatgagcgaaggtgaccactacatcaattttacaaaagtccatgatcaggaaagtctattcgctaccataggaatatgtgctaaaatcactgaacattggggatacaaaaagatttcagaatctagattccaatcattgggaaacattacagatctgatgaccgacgataatataaacatcttgatactttttctagaaaaaaaattgaattgatgatataggggtcttcataacgcataattattacgttagcattctatatccgtgttaaaaaaaattatcctatcatgtatttgagagttttatatgtagcaaacatgatagctgtgatgccaataagctttagatattcacgcgtgctagtgttagggatggtattatctggtggtgaaatgtccgttatataatctacaaaacaatcatcgcatatagtatgcgatagtagagtaaacatttttatagtttttactggattcatacatcgtctacccaatttggttataaatgaaattgtcgccaatcttacacccaaccccttgttatccattagtatagtattaacttcgttatttatgtcataaactgtaaatgattttgtagatgccatatcatacatgatattcatgtccctattataatcattactaactttatcacaatatatgttgataatatctatatatgatctagtctttgtgggcaactgtctatacaagtcgtctaaacgttgtttactcatatagtatcgaacagccatcattacatggtcccgttccgttgatagataatcgagtatgttagtggacttgtcaaatctatataccatattttctggaagtggatatacatagtcgtgatcaacattattgctagcctcatcttctatatcatgtactataccattatctatatcatctacataatctacgatattattacacataaacatcgacaacatactattgtttattatctaagtcctgttgatccaaacccttgatctcctctatttgtactatctagagattgtacttcttccagttctggataatatatacgttgatagattagctgagctattctatctccagtatttacattaaacgtacattttccattattaataagaatgactcctatgtttcccctataatcttcgtctattacaccacctcctatatcaatgccttttagtgacagaccagacctaggagctattctaccatagcaaatcttaggcatggacatactaatatctgtcttaattaactgtctttctcctggagggatagtataatcgtaagcgctatacaaatcatatccggcagcacccggcgattgcctagtaggagatttagctctgttagtttccttaacaaatctaactggtgagttaatattcatgttgaacataaaactaatattttatttcaaaattatttaccatcccatatattccatgaataagtgtgatgattgtacacttctatagtatctatatacgattcacgataaaatcctcctatcaatagcagtttattatccactatgatcaattctggattatccctcggataaataggatcatctatcagagtccatgtattgctggattcacaataaaattccgcatttctaccaaccaagaataaccttctaccgaacactaacgcgcatgatttataatgaggataataagtggatggtccaaactgccactgatcatgattgggtagcaaatattctgtagttgtatcagtttcagaatgtcctcccattacgtatataacattgtttatggatgccactgctggattacatctaggtttcagaagactcggcatattaacccaagcagcatccccgtggaaccaacgctcaacagatgtgggatttggtagacctcctactacgtataatttattgttagcgggtatcccgctagcatacagtctggggctattcatcggaggaattggaatccaattgtttgatatataatttacagctatagcattgttatgtatttcattgttcatccatccaccgatgagatatactacttctccaacatgagtacttgtacacatatggaatatatctataatttgatccatgttcataggatactctatgaatggatacttgtatgatttgcgtggttgtttatcacaatgaaatattttggtacagtctagtatccattttacattatttatacctctgggagaaagataatttgacctgattacatttttgataaggagtagcagatttcctaatctatttcttcgctttatataccacttaatgacaaaatcaactacataatcctcatctggaacatttagttcatcgctttctagaataagtttcatagatagataatcaaaattgtctatgatgtcatcttccagttccaaaaagtgtttggcaataaagtttttagtatgacataagagattggatagtccgtattctatacccatcatgtaacactcgacacaatattcctttctaaaatctcgtaagataaagtttatacaagtgtagatgataaattctacagaggttaatatagaagcacgtaataaattgacgacgttatgactatctatatatacctttccagtatacgagtaaataactatagaagttaaactgtgaatgtcaaggtctagacaaaccctcgtaactggatctttatttttcgtgtatttttgacgtaaatgtgtgcgaaagtaaggagataactttttcaatatcgtagaattgactattatattgccacctatagcatcaataattgttttgaatttcttagtcatagacaatgctaatatattcttacagtacacagtattaacaaatatcggcatttatgtttctttaaaagtcaacatctagagaaaaatgattatctttttgagacataactcccattttttggtattcacccacacgtttttcgaaaaaattagtttttccttccaatgatatattttccatgaaatcaaacggattggtaacattataaatttttttaaatcccaattcagaaatcaatctatccgcgacgaattctatatatgttttcatcatttcacaattcattcctataagtttaactggaagagccgcagtaagaaattcttgttcaatggatactgcatctgttataatatatctaacggtttcttcactcggtggatacaataaatgtttaaacatcaaacatgcgaaatcgcagtgcagaccctcgtctctactaattagttcgttggaaaacgtgagtccgggcattaggccacgctttttaagccaaaatatggaagcgaatgatccggaaaagaagattccttctactgcagcaaaggcaataagtctctctccataaccggcgctgtcatgtatccacttttgagcccaatcggccttcttttttacacaaggcatcgtttctatggcattaaagagatagtttttttcattactatctttaacataagtatcgatcaaaagactatacatttccgaatgaatgttttcaatggccatctgaaatccgtagaaacatctagcctcggtaatctgtacttctgtacaaaatcgttccgccaaattttcattcactattccgtcactggctgcaaaaaacgccaatacatgttttataaaatatttttcgtctggtgttagtttattccaatcattgatatctttagatatatctacttcttccactgtccaaaatgatgcctctgcctttttatacatgttccagatgtcataatattggattgggaaaataacaaatctatttggatttggtgcaaggatgggttccataactaaattaacaatatcaataaattttttttcagttatctatatgcctgtacttggattttttgtacatcgatatcgccgcaatcactacaataattacaagtattattgatagcattgttattagtactatcataattaaattatcgacattcatgggtgctgaataatcgttattatcatcattatcattttgtaattgtgacatcatactaaataaatcgtttgcgagattgttgtgggaagcgggcatggaggatgcattatcattattatttaacgccttccatttggattcacaaatgttacgcacattcaacattttatggaaactataattttgtgaaaacagataacaagaaaactcgtcatcgttcaaatttttaacgatagtaaaccgattaaacgtcgagctaatttctaacgctagcgactctgttggatatgggtttccagatatatatcttttcagttcccctacgtatctataatcatctgtaggaaatggaagatatttccatttatctactgttcctaatatcatatgtggtggtgtagtagaaccattaagcgcgaaagatgttatttcgcatcgtattttaacttcgcaataatttctggttagataacgcactctaccagtcaagtcaatgatattagcctttacagatatattcatagtagtcgtaacgatgactccatcttttagatgcgatactcctttgtatgtaccagaatcttcgtacctcaaactcgatatatttaaacaagttaatgagatattaacgcgttttatgaatgatgatatataaccagaagttttatcctcggtggctagcgctataaccttatcattataataccaactagtgtgattaatatgtgacacgttagtgtgggtacaaatatgtacattatcgtctacgtcgtattcgatacatccgcatacagccaacaaatataaaatgacaaatactctaacgccgttcgtacccatcttgatgcggtttaataaatgttttgatttcaatttattgtaaaaaaagattcggttttatactgttcgatattctcattgcttatattttcatctatcatctccacacagtcaaatccgtggttagcatgcacctcatcaaccggtaaaagactatcggactcttctatcattataactctagaatatttaatttggtcattattaatcaagtcaattatcttatttttaacaaacgtgagtattttactcattttttataaaaacttttagaaatatacagactctatcgtgtgtctatatcttctttttatatccaatgtatttatgtctgatttttcttcatttatcatatataatggtccaaattctacacgtgcttcggattcatccagatcattaaggttcttataattgtaacatccttctcttccctcttctacatcttccttcttattcttattcttagcgtcacagaatctaccacagcaggatcccatgacgagcgtcatattaaactaattcattttcaattataatatactggtaatgaccattaaaataaaaatattcttcataaccggtaagaaagtgaaaagttcacattgaaactatgtcagtagtatacatcatgaaatgatgatatatatatactctattttggtggaggattatatgatataattcgtggataatcatttttaagacacatttctttattcgtaaatcttttcacgttaaatgagtgtccatattttgcaatttcttcatatgatggcggtgtacgtggacgaggctgctcctgttcttgttgtggtcgccgactgtcgtgtctgcgtttagatccctccattatcgcgattgcgtagatggagtactattatataccttgtaattaaatttttttattaattaaacgtataaaaacgttccgtatctgtatttaagagccagatttcgtctaatagaacaaatagctacagtaaaaataactagaataattgctacacccactagaaaccacggatcgtaatacggcaatcggttttcgataataggtggaacgtatattttatttaaggacttaacaattgtctgtaaaccacaatttgcttccgcggatcctgtattaactatctgtaaaagcatatgttggccgggcggagccgaacattctccgatatccaatttctgtatatctataatattattaacctccgcatacgcattacagttcttttctagcttggatactacactaggtacatcatctagatctattcctatttcctcagcgatagctcttctatccttttccggaagcaatgaaatcacttcaataaatgattcaaccatgagtgtgaaactaagtcgagaattactcatgcatttgttagttattcggagcgcgcaatttttaaactgtcctataacctctcctatatgaatagcacaagtgacattagtagggatagaatgttgagctaatttttgtaaataactatctataaaaagattatacaaagttttaaactctttagtttccgccatttatccagtctgagaaaatgtctctcataataaatttttccaagaaactaattgggtgaagaatggaaacctttaatctatatttatcacagtctgttttggtacacatgatgaattcttctaatgctgtactaaattcgatatctttttcgatttctggatatgtttttaataaagtatgaacaaagaaatggaaatcgtaataccagttatgtttaactttgaaattgttttttattttcttgttaatgattccagccacttgggaaaagtcaaagtcgtttaatgccgatttaatacgttcattaaaaacaaactttttatcctttagatgaattattattggttcattggaatcaaaaagtaagatattatcgggtttaagatctgcgtgtaaaaagttgtcgcagcatggtagttcgtaaattttaatgtataacagagccatctgtaaaaagataaactttatgtattgtaccaaagatttaaatcctaatttgatagctaactcggtatctactttatctgcagaatacagtgctaggggaaaaattataatatttcctctttcgtattcgtagttagttctcttttcatgttcgaaaaagtgaaacatgcggttaaaatagtttataacattaatattactgttaataactgccgggtaaaagtgggatagtaatttcacgaatttgatactgtcctttctctcgttaaacgcctttaaaaaaactttagaagaatatctcaatgagagttcctgaccatccatagtttgtatcaataatagcaacatatgaagaacccgtttatacagagtatgtaaaaatgttaatttatagtttaatcccatggcccacgcacacacgattaattttttttcatctccctttagattgttgtatagaaatttgggtactgtgaactccgccgtagtttccatgggactatataattttgtggcctcgaatacaaattttactacatagttatctatcttaaagactataccatatcctcctgtagatatgtgataaaaatcgtcgtttataggataaaatcgtttatccttttgttggaaaaaggatgaattaatgtaatcattctcttctatctttagtagtgtttccctattaaaattcttaaaataatttaacaatctaactgacggagcccaattttggtgtaaatctaattgggacattatattgttaaaatacaaacagtctcctaatataacagtatctgataatctatggggagacatccattgatattcaggggatgaatcattggcaacacccatttattgtacaaaaagcccctagggataacagggtaat

SEQ ID NO: 56 - DNA, 23333 bp, Vaccinia virus
tagggataacagggtaattctttagtttccgccatttatccagtctgagaaaatgtctctcataataaatttttccaagaaactaattgggtgaagaatggaaacctttaatctatatttatcacagtctgttttggtacacatgatgaattcttctaatgctgtactaaattcgatatctttttcgatttctggatatgtttttaataaagtatgaacaaagaaatggaaatcgtaataccagttatgtttaactttgaaattgttttttattttcttgttaatgattccagccacttgggaaaagtcaaagtcgtttaatgccgatttaatacgttcattaaaaacaaactttttatcctttagatgaattattattggttcattggaatcaaaaagtaagatattatcgggtttaagatctgcgtgtaaaaagttgtcgcagcatggtagttcgtaaattttaatgtataacagagccatctgtaaaaagataaactttatgtattgtaccaaagatttaaatcctaatttgatagctaactcggtatctactttatctgcagaatacagtgctaggggaaaaattataatatttcctctttcgtattcgtagttagttctcttttcatgttcgaaaaagtgaaacatgcggttaaaatagtttataacattaatattactgttaataactgccgggtaaaagtgggatagtaatttcacgaatttgatactgtcctttctctcgttaaacgcctttaaaaaaactttagaagaatatctcaatgagagttcctgaccatccatagtttgtatcaataatagcaacatatgaagaacccgtttatacagagtatgtaaaaatgttaatttatagtttaatcccatggcccacgcacacacgattaattttttttcatctccctttagattgttgtatagaaatttgggtactgtgaactccgccgtagtttccatgggactatataattttgtggcctcgaatacaaattttactacatagttatctatcttaaagactataccatatcctcctgtagatatgtgataaaaatcgtcgtttataggataaaatcgtttatccttttgttggaaaaaggatgaattaatgtaatcattctcttctatctttagtagtgtttccctattaaaattcttaaaataatttaacaatctaactgacggagcccaattttggtgtaaatctaattgggacattatattgttaaaatacaaacagtctcctaatataacagtatctgataatctatggggagacatccattgatattcaggggatgaatcattggcaacacccatttattgtacaaaaagccccaatttacaaacgaaagtccaggtttgatagagacaaactattaactattttgtctctgtttttaatttctttagtaatgaaattattcacaatatcagtatcttctttatctaccagagattttactaacttgataaccttggctgtctcattcaatagggtagtaatatttgtatgtgtgatattgatatctttttgaattgtttcttttagaagtgattctttgatggtgccagcatacgaattacaataatgcagaaactcggttaacatgcaggaattatagtaagccaattccaattgttgcctgtgttgtattagagtgtcaatatgagcaatggtgtccttgcgtttctctgatagaatgcgagcagcgattttggcgttatcatttgacgatatttctggaatgacgaatcctgtttctactaactttttggtaggacaaagtgaaacaatcaagaagatagcttctcctcctatttgtggaagaaattgaactcctctagatgatctactgacgatagtatctccttgacagatattggaccgaattacagaagtacctggaatgtaaagccctgaaaccccctcattttttaagcagattgttgccgtaaatcctgcactgtgaccaagatagagagctcctttggtgaatccatctctatgtttcagtttaaccaagaaacagtcagctggtctaaaatttccatctctatctaatacagcatctaacttgatgtcaggaactatgaccggtttaatgttatatgtaacattgagtaaatccttaagttcataatcatcactgtcatcagttatgtacgatccaaacaatgtttctaccggcatagtggatacgaagatgctatccatcagaatgtttccctgattagtattttctatatagctattcttctttaaacgattttccaaatcagtaactatgttcatttttttaggagtaggacgcctagccagtatggaagaggattttctagatcctctcttcaacatctttgatctcaatggaatgcaaaaccccatagtgaaacaaccaacgataaaaataatattgtttttcactttttataattttaccatctgactcatggattcattaatatctttataagagctactaacgtataattctttataactgaactgagatatatacaccggatctatggtttccataattgagtaaatgaatgctcggcaataactaatggcaaatgtatagaacaacgaaattatactagagttgttaaagttaatattttctatgagctgttccaataaattatttgttgtgactgcgttcaagtcataaatcatcttgatactatccagtaaacagtctttaagttctggaatattatcatcccattgtaaagcccctaattcgactatcgaatatcctgctctgatagcagtttcaatatcgacggacgtcaatactgtaataaaggtggtagtattgtcatcatcgtgataaactactggaatatggtcgttagtaggtacggtaactttacacaacgcgatatataactttccttttgtaccatttttaacgtagttgggacgtcctgcagggtattgttttgaagaaatgatatcgagaacagatttgatacgatatttgttggattcctgattatttactataatataatctagacagatagatgattcgataaatagaaaaggtatatcgttggtaggataatacatccccattccagtattctcggatactctattaatgacactagttaagaacatgtcttctattctagaaaacgaaaacatcctacatggactcattaaaacttctaacgctcctgattgtgtctcgaatgcctcgtacaaggatttcaaggatgccatagattctttgaccaacgatttagaattgcgtttagcatctgatttttttattaaatcgaatggtcggctctctggtttgctaccccaatgataacaatagtcttgtaaagataaaccgcaagaaaatttatacgcatccatccaaataaccctagcaccatcggatgatattaatgtattattatagattttccatccacagttattgggccagtatactgttagcaacggtatatcgaatagattactcatgtaacctactagaatgatagttcgtgtactagtcataatatctttaatccaatctaagaaatataaaattagatcttttacactgttaaagttaacaaaggtattacccgggtacgtggatatcatatatggtattggtccattatcagtaatagctccataaactgatacggcgatggtttttatatgtgtttgatctaacgaggaagaaattcgcgcccacaattcatctctagatatgtatttaatatcaaacggtaacacatcaatttcgggacgcgtatatgtttctaaatttttaatccaaatataatgatgacctatatgccctattatcatactgtcaactatagtacacctagagaacttacgatacatctgtttcctgtaatcgttaaattttacaaatctataacatgctaaaccttttgacgacaaccattcattaatttctgatatggaatctgtattctcgataccgtattgttctaaagccagtgctatatctccctgttcgtgggaacgctttcgtataatatcgatcaacggataatctgaagtttttggagaataatatgactcatgatctatttcgtccataaacaatctagacataggaattggaggcgatgatcttaattttgtgcaatgagtcgtcaatcctataacttctaatcttgtaatattcatcatcgacataatactatctatgttatcatcgtatattagtataccatgaccttcttcatttcgtgccaaaataatatacagtcttaaataattacgcaatatctcaatagtttcataattgttagctgttttcatcaaggtttgtatcctgtttaacatgatggcgttctatacgtttctattttctattttttaaatttttaacgatttactgtggctagatacccaatctctctcaaatatttttttagcctcgcttacaagctgtttatctatactattaaaactgacgaatccgtgattttggtaatgggttccgtcgaaatttgccgaagtgatatgaacatattcgtcgtcgactatcaacaattttgtattattctgaatagtgaaaaccttcacagatagatcattttgaacacacaacgcgtctagacttctggcggttgccatagaatatacgtcgttcttatcccaattaccaactagaagtctgatcttaactcctctattaatggctgcttctataatggagttgtaaatgtcgggccaatagtagctattaccgtcgacacgtgtagtgggaactatggccaaatgttcaatatctatactagtcttagctgacctgagtttatcaataactacatcggtatctaaatctctagaatatcccaataggtgttccggagaatcagtaaagaacactccacctataggattcttaatatgatacgcagtgctaactggcaaacaacaagccgcagagcataaattcaaccatgaattttttgcgctattaaaggctttaaaagtatcaaatcttctacgaagatctgtggccagcgggggataatcagaatatacacctaacgttttaatcgtatgtatagatcctccagtaaatgacgcgtttcctacataacatctttcatcatctgacacccaaaaacaaccgagtagtagtcccacattattttttttatctatattaacggttataaaatttatatccgggcagtgactttgtagctctcccagatttcttttccctcgttcatctagcaaaactattattttaatccctttttcagatgcctcttttagtttatcaaaaataagcgctcccctagtcgtactcagaggattacaacaaaaagatgctatgtatatatatttcttagctagagtgataatttcgttaaaacattcaaatgttgttaaatgatcggatctaaaatccatattttctggtagtgtttctaccagcctacattttgctcccgcaggtaccgatgcaaatggccacatttagttaacataaaaacttatacatcctgttctatcaacgattctagaatatcatcggctatatcgctaaaattttcatcaaagtcgacatcacaacctaactcagtcaatatattaagaagttccatgatgtcatcttcgtttatttctatatccgtatccattgtagattgttgaccgattatcgagtttaaatcattactaatactcaatccttcagaatacaatctgtgtttcattgtaaatttataggcggtgtatttaagttggtagattttcaattatgtatcaatatagcaacagtagttcttgctcctccttgattctagcatcctcttcattattttcttctacgtacataaacatgtccaatacgttagacaacacaccgacgatggcggccgccacagacacgaatatgactaaaccgatgaccatttaaaaacccctctctagctttcacttaaactgtatcgattattcttttagaacatgtataatataaaaacattattctatttcgaatttaggcttccaaaaatttttcatccgtaaaccgataataatatatatagacttgttaatagtcggaataaatagattaatgcttaaactatcatcatttccacgattagagatacaatatttacattttttttgctgtttcgaaactttatcaatacacgttaatacaaacccaggaaggagatattgaaactgaggctgttgaaaatgaaacggtgaatacaataattcagataatgtaaaatcatgattccgtattctgatgatattagaactgctaatggatgtcgatggtatgtatctaggagtatctattttaacaaagcatcgatttgctaatatacaattatccttttgattaattgttattttattcatattcttaaaaggtttcatatttatcaattcttctacattaaaaatttccatttttaatttatgtagccccgcaatactcctcattacgtttcattttttgtctataatatccattttgttcatctcggtacatagattatccaattgagaagcgcatttagtagttttgtacattttaagtttattgacaaatcgtcgaaaactagttatagttaacattttattatttgataccctgatattaatacccctgccgttactattatttataactgatgtaacccacgtaacattagaattaattatcgatagtaatgcatcaacgcttccaaaattgtctattataaactcaccgataatttttttattacatgttttcatattcattaggattatcaaatctttaatcttactacgattgtatgcgttgatattgcaagacgtcattctaaaagacggaggatctccatcaaatgccaaacaatcacgtacaaagtacatggaaataggttttgttctattgcgcatcatagatttatatagaacacccgtagaaatactaatttgttttactctataaaatactaatgcatctatttcatcgttttgtataacgtctttccaagtgtcaaattccaaatttttttcattgatagtaccaaattcttctatctctttaactacttgcatagataggtaattacagtgatgcctacatgccgttttttgaaactgaatagatgcgtctagaagcgatgctacactagtcacaatcaccactttcatatttagaatatatgtatgtaaaaatatagtagaatttcattttgtttttttctatgctataaatgaattctcattttgcatctgctcatactccgttttatatcaataccaaagaaggaagatatctggttctaaaagccgttaaagtatgcgatgttagaactgtagaatgcgaaggaagtaaagcttcctgcgtactcaaagtagataaaccctcatcacccgcgtgtgagagaagaccttcgtccccgtccagatgcgagagaatgaataaccctggaaaacaagtcccgtttatgagaacggacatgctacaaaatatgttcgcggctaatcgcgacaacgtggcgtcgagacttttgaactaaaatacaattatatctttttcgatattaataaatccgtgtcgcccgggttttttatctctttcagtatgtgaatagataggtattttatctctattcatcatcgaatttaagagatccgataaacattgtttgtattctccagatgtcagcatctgatacaacaatatatgtgcacataaacctctggcacttatttcatgtaccttccccttatcactaaggagaatagtatttgagaaatatgtatacatgatattatcatgaattagatatacagaatttgtaacactctcgaaatcacacgatgtgtcggcgttaagatctaatatatcactcgataacacattttcatctagatacactagacattttttaaagctaaaatagtctttagtagtgacagtaactatgcgattattttcatcgatgatacatttcatcggcatattattacgcttaccatcaaagactataccatgtgtatatctaacgtattctagcatggttgccatacgcgcattaaacttttcaggatctttggatagatcttccaatctatctatttgagaaaacatttttatcatgttcaatagttgaaacgtcggatccactatatagatattatctataaagattttaggaactacgttcatggtatcctggcgaatattaaaactatcaatgatatgattatcgttttcatcttttatcaccatatagtttctaagatatgggattttacttaatataatattatttcccgtgataaattttattagaaaggccaaatctataagaaaagtcctagaattagtctgaagaatatctatatcgccgtatagtatatttggattaattagatatagagaatatgatccgtaacatatacaacttttattatggcgtctaagatattcttccatcaacttattaacatttttgactagggaagatacattatgacgtcccattacttttgccttgtctattactgcgacgttcatagaatttagcatatctcttgccaattcttccattgatgttacattataagaaattttagatgaaattacatttggagctttaatagtaagaactcctaatatgtccgtgtatgtggtcactaatacagattgtagttctataatcgtaaataatttacctatattatatgtttgagtctgtttagaaaagtagctaagtatacgatcttttatttctgatgcagatgtatcaacatcggaaaaaaatctttttttattcttttttactaaagatacaaatatgtctttgttaaaaacagttattttctgaatatttctagcttgtaattttaacatatgatattcgttcacactaggtactctgcctaaataggtttctataatctttaatgtaatattaggaaaagtattctgatcaggattcctattcattttgaggatttaaaactctgattattgtctaatattgtctctacgcaaactttttcacagagcgatagagtttttgataactcgtttttcttaagaaatataaaactactgtctccagagctcgctctatcttttattttatctaattcgatacaaactcctgatactggttcagaaagtaattcattaattttcagtcctttatagaagatatttaatatagataatacaaaatcttcagtttttgatatcgatctgattgatcctagaactagatatattaataacgtgctcattaggcagtttatggcagcttgataattagatatagtatattccagttcatatttattagataccgcattgcccagattttgatattctatgaattcctctgaaaataaatccaaaataactagacattctattttttgtggattagtgtactctcttccctctatcatgttcactactggtgtccacgatgataaatatctagagggaatataatatagtccataggatgccaatctagcaatgtcgaataactgtaattttattcttcgctcttcattatgaattgattcttgaggtataaacctaacacaaattatattattagacttttcgtatgtaatgtctttcatgttataagtttttaatcctggaatagaatctattttaatgaggcttttaaacgcagagttctccaacgagtcaaagcataatactctgttgtttttcttatatacgatgttacgattttcttctttgaatggaataggtttttgaattagtttataattacaacataatagataaggaagtgtgcaaatagtacgcggaaaaaacataatagctcccctgttttcatccatggttttaagtaaatgatcactggcttctttagtcaatggatattcgaacattaaccgtttcatcatcattggacagaatccatatttcttaatgtaaagagtgatcaaatcattgtgtttattgtaccatcttgttgtaaatgtgtattcggttatcggatctgctcctttttctattaaagtatcgatatcgatctcgtctaagaattcaactatatcgacatatttcatttgtatacacataaccattactaacgtagaatgtataggaagagatgtaacgggaacagggtttgttgattcgcaaactattctaatacataattcttctgttaatacgtcttgcacgtaatctattatagatgccaagatatctatataattattttgtaagatgatgttaactatgtgatctatataagtagtgtaataattcatgtattttgatatatgttccaactctgtctttgtgatgtctagtttcgtaatatctatagcatcctcaaaaaatatattcgcatatattcccaagtcttcagttctatcttctaaaaaatcttcaacgtatggaatataataatctattttacctcttctgatatcattaatgatatagtttttgacactatcttctgtcaattgattcttattcactatatctaagaaacggatagcgtccctaggacgaactactgccattaatatctctattatagcttctggacataattcatctattataccagaattaatgggaactattccgtatctatctaacatagttttaagaaagtcagaatctaagacttgatgttcatatattggttcatacatgaaatgatctctattgatgatagtgactatttcgttctctgaaaattggtaactcattttatatatgctttccttgttgatgaaggataggatatactcaatagaatttgtaccaacaaactgttctcttatgaatcgtatatcatcatctgaaataatcatgtaaggcatacatttaacaattagagacttgtctcctgttatcaatatactattcttgtgataatttatgtgtgaggcaaatttgtccacgttctttaattttgttatagtagatatcaaatccaatggagctacagttcttggcttaaacagatatagtttttctggaacgaattctacaacattattataaaggactttgggtagataagtgggatgaaatcctattttaattaatgctatcgcattgtcctcgtgcaaatatccaaacgcttttgtgatagtatgacattcattatctagaaacgctctacgaatatctgtcacagatatcatctttagagaatactagttgcgttaatagtactaaaatttgtattttttttaatatatctcaaaaaaaattaatatttatggatccgatgtataattagaatcagaatctaatgatgacgtacccaagaagtttatctacagccaatttagctgcattatttttagcatctcgtttagattttccatcggccttatcgaatactcttccgtcgatatctacacaggcataaaatgtaggagagttactaggcccaactgattcaatacgaaaagaccaatctctcttagttatttggcagtactcattaataatggtgacagggttagcatctttccaatcaataatttttttagccggaataacatcatcaaaagacttatgatcctctctcattgatttttcgcgggatacatcatctattatggcgtcagccataacatcagcatccggcttatccgcctccgttgtcataaaccaacgaggaggaatatcgtcggagctgtacaccatagcactacgttgaagatcgtacagagctttattaacttctcgcttctccatattaagttgtctagttagttgtgcagcagtagctccttcgattccaatgtttttaatagccgcacacacaatctctgcgtcagaacgctcgtcaatatagatcttagacatttttagagagaactaacacaaccagcaataaaactgaacctactttatcatttttttattcatcatcctctggtggttcgtcgttcctatcgaatgtggatctgattaacccgtcatctataggtgatgctggttctggagattctggaggagatggattattatctggaagaatctctgttatttccttgttttcatgtatcgattgcgttgtaacattaagattgcgaaatgctctaaatttgggaggcttaaagtgttgtttgcaatctctacacgcatgtctaactagtggaggttcgtcagcggctctagtttgaatcatcatcggcgtagtattcctacttttacagttaggacacggtgtattgtatttctcgtcgagaacgttaaaataatcgttgtaactcacatcctttattttatctatattgtattctactcctttcttaatgcattttataccgaataagagatagcgaaggaattctttttcggtgccgctagtacccttaatcatatcacatagtgttttatattccaaatttgtggcaatagacggtttatttctatacgatagtttgtttctggaatcctttgagtattctataccaatattattctttgattcgaatttagtttcttcgatattagattttgtattacctatattcttgatgtagtactttgatgatttttccatggcccattctattaagtcttccaagttggcatcatccacatattgtgatagtaattctcggatatcagtagcggctaccgccattgatgtttgttcattggatgagtaactactaatgtatacattttccatttataacacttatgtattaactttgttcatttatattttttcattattatgttgatattaacaaaagtgaatatatatgttaataattgtattgtggttatacggctacaatttcataatgagtggaagtcagtgtccgatgatcaatgacgatagctttactctgaaaagaaagtatcaaatcgatagtgcggagtcaacaatgaaaatggataagaagaggacaaagtttcagaatagagccaaaatggtaaaagaaataaatcagacaataagagcagcacaaactcattacgagacattgaaactaggatacataaaatttaagagaatgattatgactactactctagaagatatagcaccatctattccaaataatcagaaaacttataaactattctcggacatttcagccatcggcaaagcatcacggaatccaagtaagatggtatatgctctgctgctttacatgtttcccaatttgtttggagatgaccatagattcattcgttatagaatgcatccaatgagtaaaatcaaacacaagatcttctctcctttcaaacttaatcttattagaatattagtggaagaaagattctataataatgaatgcagatctaataaatggaacacaagttgataaaatgttgatagctgaatctgataaatatacaatagatgcaaggtataacctaaaacccatgtatagaatcaagggagaatctgaagaagataccctcttcatcaaacagatggtagaacaatgtgtgacatcccaggaattggtggaaaaagtgttgaagatactgtttagagatttgttcaagagtggagaatacaaagcatacagatacgatgatgatgtagaaaatggatttattggattggatacactaaaattaaacattgttcatgatatagttgaaccatgtatgcctgttcgtaggccagtggctaagatactgtgtaaagaaatggtaaataaatactttgagaatccgctacatattattggtaaaaatcttcaagagtgcattgactttgttagtgaataggcatttcatctttctccaatactaattcaaattgttaaattaataatggatagtataaatagttattagtgataaaatagtaaaaataattattagaataagagtgtagtatcatagataactctcttctataaaaatggattttattcgtagaaagtatcttatatacacagtagaaaataatatagattttttaaaggatgatacattaagtaaagtaaacaattttaccctcaatcatgtactagctctcaagtatctagttagcaattttcctcaacacgttattactaaggatgtattagctaataccaatttttttgttttcatacatatggtacgatgttgtaaagtgtacgaagcggttttacgacacgcatttgatgcacccacgttgtacgttaaagcattgactaagaattatttatcgtttagtaacgcaatacaatcgtacaaggaaaccgtgcataaactaacacaagatgaaaaatttttagaggttgccgaatacatggacgaattaggagaacttataggcgtaaattatgacttagttcttaatccattatttcacggaggggaacccatcaaagatatggaaatcatttttttaaaactgtttaagaaaacagacttcaaagttgttaaaaaattaagtgttataagattacttatttgggcttacctaagcaagaaagatacaggcatagagtttgcggataatgatagacaagatatatacactctatttcaacaaactggtagaatagtccatagcaatctaacagaaacgtttagagattatatctttcccggagataagactagctattgggtgtggttaaacgaaagtatagctaatgatgcggatattgttcttaatagacacgccattaccatgtatgataaaattcttagttatatatactctgagataaaacaaggacgcgttaataaaaacatgcttaagttagtttatatctttgagcctgaaaaagatatcagagaacttctgctagaaatcatatatgatattcctggagatatcctatctattattgatgcaaaaaacgacgattggaaaaaatattttattagtttttataaagctaattttattaacggtaatacatttattagtgataaaacgtttaacgaggacttattcagagttgttgttcaaataaatcccgaatatttcgataatgaacgaattatgtctttattctctacgagtgctgcggacattaaacgatttgatgagttagatattaataacagttatatatctaatataatttatgaggtgaacgatatcacattagatacaatggatgatatgaagaagtgtcaaatctttaacgaggatacgtcgtattatgttaaggaatacaatacatacctgtttttgcacgagtcggatcccatggtcatagagaacggaatactaaagaaactgtcatctataaaatccaagagtagacggctgaacttgtttagcaaaaacattttaaaatattatttagacggacaattggctcgtctaggtcttgtgttagatgattataaaggagacttgttagttaaaatgataaaccatcttaagtctgtggaggatgtatccgcattcgttcgattttctacagataaaaaccctagtattcttccatcgctaatcaaaactattttagctagttataatatttccatcatcgtcttatttcaaaggtttttgagagataatctatatcatgtagaagaattcttggataaaagcatccatctaaccaagacggataagaaatatatacttcaattgataagacacggtagatcatagaacagaccaaatatattattaataatttgtatatacatagatataattatcacatattaaaaattcacacatttttgataaatgggaactgctgcaacaattcagactcccaccaaattaatgaataaagaaaatgcagaaatgattttggaaaaaattgttgatcatatagttatgtatattagtgacgaatcaagtgattcagaaaataatcctgaatatattgattttcgtaacagatacgaagactatagatctctcattataaaaagtgatcacgagtttgtaaagctatgtaaaaatcatgcggagaaaagttctccagaaacgcaacaaatgattatcaaacacatatacgaacaatatcttattccagtatctgaagtactattaaaacctataatgtccatgggtgacataattacatataacggatgtaaagacaatgaatggatgctagaacaactctctaccctaaactttaacaatctccgcacatggaactcatgtagcataggcaatgtaacgcgtctgttttatacattttttagttatctgatgaaagataaactaaatatataagtataatcccattctaatactttaacctgatgtattagcatcttattagaatattaacctaactaaaagacataacataaaaactcattacatagttgataaaaagcggtaggatataaatattatggctgccaccgttccgcgttttgacgacgtgtacaaaaatgcacaaagaagaattctagatcaagaaacattttttagtagaggtctaagtagaccgttaatgaaaaacacatatctatttgataattacgcgtatggatggataccagaaactgcaatttggagtagtagatacgcaaacctagatgctagtgactattatcccatttcgttgggattacttaaaaagtttgagtttctcatgtctctatataaaggtcctattcccgtatatgaagaaaaagtaaatactgaattcattgctaatggatctttctccggtagatatgtatcatatcttagaaagttttctgctcttccaacaaacgagtttattagttttttgttactgacttccattccaatctataatatcttgttctggtttaaaaatactcagtttgatattactaaacacacattattcagatacgtctatacagataatgccaaacacctggcgttggctaggtatatgcatcaaacaggagactataagcctttgtttagtcgtctcaaagagaattatatatttaccggtcccgttccaataggtatcaaagatatagatcaccctaatcttagtagagcaagaagtccatccgattatgagacattagctaatattagtactatattgtactttaccaagtatgatccggtattaatgtttttattgttttacgtacctgggtattcaattactacaaaaattactccagccgtagaatatctaatggataaactgaatctaacaaagagcgacgtacaactgttgtaaattattttatgcttcgtaaaatgtaggttttgaaccaaacattctttcaaagaatgagatgcataaaactttattatccaatagattgactatttcggacgtcaatcgtttaaagtaaacttcgtaaaatattctttgatcactgccgagtttaaaacttctatcgataattgtttcatatgttttaatatttacaagttttttggtccatggtccattaggacaaatatatgcaaaataatatcgttctccaagttctatagtctctggattatttttattatattcagtaaccaaatacatattagggttatctgcggatttataatttgagtgatgcattcgactcaacataaataattctagaggagacgatctactatcaaattcggatcgtaaatctgtttctaaagaacggagaatatctatacatacctgattagaattcatccgtccttcagacaacatctcagacagtctggttttgtacatcttaatcatattcttatgaaacttggaaacatctcttctagtttcactagtacctttattaattctctcaggtacagattttgaattcgacgatgctgagtatttcatcgttgtatatttcttcttcgattgcataatcagattcttatataccgcctcaaactctattttaaaattattaaacaatactctattattaatcagtcgttctaactctttcgctatttctatagacttatcgacatcttgactgtctatctctgtaaacacggagtcggtatctccatacacgctacgaaaacgaaatctgtaatctataggcaacgatgttttcacaatcggattaatatctctatcgtccatataaaatggattacttaatggattggcaaaccgtaacataccgttagataactctgctccatttagtaccgattctagatacaagatcattctacgtcctatggatgtgcaactcttagccgaagcgtatgagtatagagcactatttctaaatcccatcagaccatatactgagttggctactatcttgtacgtatattgcatggaatcatagatggccttttcagttgaactggtagcctgttttaacatctttttatatctggctctctctgccaaaaatgttcttaatagtctaggaatggttccttctatcgatctatcgaaaattgctatttcagagatgaggttcggtagtctaggttcacaatgaaccgtaatatatctaggaggtggatatttctgaagcaatagctgattatttatttcttcttccaatctattggtactaacaacgacaccgactaatgtttccggagatagatttccaaagatacacacattaggatacagactgttataatcaaagattaatacattattactaaacattttttgttttggagcaaataccttaccgccttcataaggaaacttttgttttgtttctgatctaactaagatagttttagtttccaacaatagctttaacagtggacccttgatgactgtactcgctctatattcgaataccatggattgaggaagcacatatgttgacgcacccgcgtctgtttttgtttctactccataatactcccacaaatactgacacaaacaagcatcatgaatacagtatctagccatatctaaagctatgtttagattataatccttatacatctgagctaaatcaacgtcatcctttccgaaagataatttatatgtatcattaggtaaagtaggacataatagtacgactttaaatccattttcccaaatatctttacgaattactttacatataatatcctcatcaacagtcacataattacctgtggttaaaacctttgcaaatgcagcggctttgcctttcgcgtctgtagtatcgtcaccgatgaacgtcatttctctaactcctctatttaatactttacccatgcaactgaacgcgttcttggatatagaatccaatttgtacgaatccaatttttcagatttttgaatgaatgaatatagatcgaaaaatatagttccattattgttattaacgtgaaacgtagtattggccatgccgcctactcccttatgactagactgatttctctcataaatacagagatgtacagcttcctttttgtccggagatctaaagataatcttctctcctgttaataactctagacgattagtaatatatctcagatcaaagttatgtccgttaaaggtaacgacgtagtcgaacgttagttccaacaattgtttagctattcgtaacaaaactatttcagaacatagaactagttctcgttcgtaatccatttccattagtgactgtatcctcaaacatcctctatcgacggcttcttgtatttcctgttccgttaacatctcttcattaatgagcgtaaacaataatcgtttaccacttaaatcgatataacagtaacttgtatgcgagattgggttaataaatacagaaggaaacttcttatcgaagtgacactctatatctagaaataagtacgatcttgggatatcgaatctaggtatttttttagcgaaacagttacgtggatcgtcacaatgataacatccattgttaatctttgtcaaatattgctcgtccaacgagtaacatccgtctggagatatcccgttagaaatataaaaccaactaatattgagaaattcatccatggtggcattttgtatgctgcgtttctttggctcttctatcaaccacatatctgcgacggagcattttctatctttaatatctagattataacttattgtctcgtcaatgtctatagttctcatctttcccaacggcctcgcattaaatggaggaggagacaatgactgatatatttcgtccgtaactacgtaataaaagtaatgaggaaatcgtataaatacagtctcaccatttcgacatctggatttcagatataaaaatctgttttcaccgtgactttcaaaccaattaatgcaccgaacatccatttctagaatttagaaatatattttcatttaaatgaatcccaaacattggggaagagccgtatggaccattatttttatagtactttcgcaagcgggtttagacggcaacatagaagcgtgtaaacgaaaactatatactatagtcagcactcttccatgtcctgcatgtagacggcacgcgactatcgctatagaggacaataatgtcatgtctagcgatgatctgaattatatttattattttttcatcagattatttaacaatttggcatctgatcccaaatacgcaatcaatgtgtcaaaggttaaccctttataaacttaacccattataaaacttatgattagtcacaactgaaataaccgcgtgattattttttggtataattctacacggcatggtttctgtgactatgaattcaacccccgttacattagtgaaatctttaacaaacagcaagggttcgtcaaagacataaaactcattgtttacaatcgaaatagaccccctatcacacttaaaataaaaaatatccttatcctttaccaccaaataaaattctgattggtcaatgtgaatgtattcacttaacagttccacaaatttatttattaactccgaggcacatacatcgtcggtattttttatggcaaactttactcttccagcatccgtttctaaaaaaatattaacgagttccatttatatcatccaatattattgaaatgacgttgatggacagatgatacaaataagaaggtacggtacctttgtccaccatctcctccaattcatgctctattttgtcattaactttaatgtatgaaaacagtacgccacatgcttccatgacagtgtgtaacactttggatacaaaatgtttgacattagtataattgtccaagactgtcaatctataatagatagtagctataatatattctatgatggtattgaagaagatgacaaccttggcatattgatcatttaacacagacatggtatcaacagatagcttgaatgaaagagaatcagtaattggaataagcgtcttctcgatagagtgtccgtataccaacatgtctgatattttgatgtattccattaaattatttagttttttctttttattttcgttaaacagcatttctgtcaacggaccccaacatcgttgaccgattaagttttgattgatttttccgtgtaaggcgtatctagtcagatcgtatagcctatccaataatccatcatctgtgcgtagatcacatcgtacactttttaattctctatagaagagcgacagacatctggagcaattacagacagcaatttctttattctctacagatgtaagatacttgaagacattcctatgatgatgcagaattttggataacacggtattgatggtatctgttaccataattcctttgatggctgatagtgtcagagcacaagatttccaatctttgacaatttttagcaccattatctttgttttgatatctatatcagacagcatggtgcgtctgacaacacagggattaagacggaaagatgaaatgattctctcaacatcttcaatggataccttgctattttttctggcattatctatatgtgcgagaatatcctctagagaatcagtatcctttttgatgatagtggatctcaatgacatgggacgtctaaaccttcttattctatcaccagattgcatggtgatttgtcttctttcttttatcataatgtaatctctaaattcatcggcaaattgtctatatctaaaatcataatatgagatgtttacctctacaaatatctgttcgtccaatgttagagtatctacatcagttttgtattccaaattaaacatggcaacggatttaattttatattcctctattaagtcctcgtcgataataacagaatgtagataatcatttaatccatcgtacatggttggaagatgcttgttgacaaaatctttaattgtcttgatgaaggtgggactatatctaacatcttgattaataaaatttataacattgtccataggatactttgtaactagttttatacacatctcttcatcggtaagtttagacagaatatcgtgaacaggtggtatattatattcatcagatatacgaagaacaatgtccaaatctatattgtttaatatattatatagatgtagcgtagctcctacaggaatatctttaactaagtcaatgatttcatcaaccgttagatctattttaaagttaatcatataggcattgatttttaaaaggtatgtagccttgactacattttcattaattaaccattccaagtcactgtgtgtaagaagattatattctatcataagcttgactacatttggtcccaataccattaaagaattcttatgatataaggaaacagcttttaggtactcatctactctacaagaattttggagagccttaacgatatcagtgacgtttattatttcaggaggaaagaatctaacattgagaatatcggaattaatagcttccagatacagtgattttggcaatagtccgtgtaatccataatccagtaacacgagctggtgcttgctagacaccttttcaatgtttaatttttttgaaataagctttgataaagccttcctcgcaaattccggatacatgaacatgtcggcgacatgattaagtattgttttttcattattttctcaacaagttctcaataccccaatagatgatagaatatcacccaatgcgtccatgttgtctatttccaacaggtcgctatatccaccaatagaagttttcccaaaaaagattctaggaacagttctaccaccagtaatttgttcaaaataatcccgcaattcattttcgggtttaaattctttaatatcgacaatttcatacgctcctcttttgaaactaaacttatttagaatatccagtgcatttctacaaaaaggacatgtatacttgacaaaaattgtcactttgttattggccaacctttgttgtacaaattcctcggccattttaatatttaagtgatataaaactatctcgacttatttaactctttagtcgagatatatggacgcagatagctatatgatagtagggataacagggtaat

SEQ ID NO: 57 - DNA, 26445 bp, Vaccinia virus
tagggataacagggtaattttctagaatttagaaatatattttcatttaaatgaatcccaaacattggggaagagccgtatggaccattatttttatagtactttcgcaagcgggtttagacggcaacatagaagcgtgtaaacgaaaactatatactatagtcagcactcttccatgtcctgcatgtagacggcacgcgactatcgctatagaggacaataatgtcatgtctagcgatgatctgaattatatttattattttttcatcagattatttaacaatttggcatctgatcccaaatacgcaatcaatgtgtcaaaggttaaccctttataaacttaacccattataaaacttatgattagtcacaactgaaataaccgcgtgattattttttggtataattctacacggcatggtttctgtgactatgaattcaacccccgttacattagtgaaatctttaacaaacagcaagggttcgtcaaagacataaaactcattgtttacaatcgaaatagaccccctatcacacttaaaataaaaaatatccttatcctttaccaccaaataaaattctgattggtcaatgtgaatgtattcacttaacagttccacaaatttatttattaactccgaggcacatacatcgtcggtattttttatggcaaactttactcttccagcatccgtttctaaaaaaatattaacgagttccatttatatcatccaatattattgaaatgacgttgatggacagatgatacaaataagaaggtacggtacctttgtccaccatctcctccaattcatgctctattttgtcattaactttaatgtatgaaaacagtacgccacatgcttccatgacagtgtgtaacactttggatacaaaatgtttgacattagtataattgtccaagactgtcaatctataatagatagtagctataatatattctatgatggtattgaagaagatgacaaccttggcatattgatcatttaacacagacatggtatcaacagatagcttgaatgaaagagaatcagtaattggaataagcgtcttctcgatagagtgtccgtataccaacatgtctgatattttgatgtattccattaaattatttagttttttctttttattttcgttaaacagcatttctgtcaacggaccccaacatcgttgaccgattaagttttgattgatttttccgtgtaaggcgtatctagtcagatcgtatagcctatccaataatccatcatctgtgcgtagatcacatcgtacactttttaattctctatagaagagcgacagacatctggagcaattacagacagcaatttctttattctctacagatgtaagatacttgaagacattcctatgatgatgcagaattttggataacacggtattgatggtatctgttaccataattcctttgatggctgatagtgtcagagcacaagatttccaatctttgacaatttttagcaccattatctttgttttgatatctatatcagacagcatggtgcgtctgacaacacagggattaagacggaaagatgaaatgattctctcaacatcttcaatggataccttgctattttttctggcattatctatatgtgcgagaatatcctctagagaatcagtatcctttttgatgatagtggatctcaatgacatgggacgtctaaaccttcttattctatcaccagattgcatggtgatttgtcttctttcttttatcataatgtaatctctaaattcatcggcaaattgtctatatctaaaatcataatatgagatgtttacctctacaaatatctgttcgtccaatgttagagtatctacatcagttttgtattccaaattaaacatggcaacggatttaattttatattcctctattaagtcctcgtcgataataacagaatgtagataatcatttaatccatcgtacatggttggaagatgcttgttgacaaaatctttaattgtcttgatgaaggtgggactatatctaacatcttgattaataaaatttataacattgtccataggatactttgtaactagttttatacacatctcttcatcggtaagtttagacagaatatcgtgaacaggtggtatattatattcatcagatatacgaagaacaatgtccaaatctatattgtttaatatattatatagatgtagcgtagctcctacaggaatatctttaactaagtcaatgatttcatcaaccgttagatctattttaaagttaatcatataggcattgatttttaaaaggtatgtagccttgactacattttcattaattaaccattccaagtcactgtgtgtaagaagattatattctatcataagcttgactacatttggtcccaataccattaaagaattcttatgatataaggaaacagcttttaggtactcatctactctacaagaattttggagagccttaacgatatcagtgacgtttattatttcaggaggaaagaatctaacattgagaatatcggaattaatagcttccagatacagtgattttggcaatagtccgtgtaatccataatccagtaacacgagctggtgcttgctagacaccttttcaatgtttaatttttttgaaataagctttgataaagccttcctcgcaaattccggatacatgaacatgtcggcgacatgattaagtattgttttttcattattttctcaacaagttctcaataccccaatagatgatagaatatcacccaatgcgtccatgttgtctatttccaacaggtcgctatatccaccaatagaagttttcccaaaaaagattctaggaacagttctaccaccagtaatttgttcaaaataatcccgcaattcattttcgggtttaaattctttaatatcgacaatttcatacgctcctcttttgaaactaaacttatttagaatatccagtgcatttctacaaaaaggacatgtatacttgacaaaaattgtcactttgttattggccaacctttgttgtacaaattcctcggccattttaatatttaagtgatataaaactatctcgacttatttaactctttagtcgagatatatggacgcagatagctatatgatagccaactacagaaggcaaacgctataaaaaacataattacgacgagcatatttataaatatttttattcagcattacttgatatagtaatattaggcacagtcaaacattcaaccactctcgatacattaactctctcattttctttaacaaattctgcaatatcttcgtaaaaagattcttgaaactttttagaatatctatcgactctagatgaaatagcgttcgtcaacatactatgttttgtatacataaaggcgcccattttaacagtttctagtgacaaaatgctagcgatcctaggatcctttagaatcacatagattgacgattcgtctctcttagtaactctagtaaaataatcatacaatctagtacgcgaaataatattatccttgacttgaggagatctaaacaatctagttttgagaacatcgataagttcatcgggaatgacatacatactatctttaatagaactcttttcatccagttgaatggattcgtccttaaccaactgattaatgagatcttctattttatcattttccagatgatatgtatgtccattaaagttaaattgtgtagcgcttctttttagtctagcagccaatactttaacatcactaatatcgatatacaaaggagatgatttatcgatggcattaagaattcgtttttcgacatctgtcaaaaccaattcctttttgcctgtatcatccagttttccatcctttgtaaagaaattattttctactagactattaataagactgataaggattcctccataattgcacaatccaaactttttcacaaaactagactttacaagatctacaggaatgcgtacttcaggtttcttagcttgtgattttttcttttgtggacattttcttgtgaccaactcatctaccatttcattgattttagcagtgaaataagctttcaatgcacgggcactgatactattgaaaacgagttgatcttcaaattccgccatttaagttcaccaaacaacttttaaatacaaatatatcaatagtagtagaataagaactataaaaaaaataataattaaccaataccaaccccaacaaccggtattattagttgatgtggtagttttctcatcacttagaacagatttaacaatttctataaagtctgtcaaatcatctttcggagaacccatatatacaccaaatatagcggcgtacaacttatccatttatacattgaatattggcttttctttatcgctatcttcatcatattcatcatcaatatcaacaagtcccagattacgagccagatcttcttctacattttcagtcattgatacacgttcactatctccagagagtccgataacgttagccaccacttctctatcaatgattagtttcttgagtgcgaatgtaatttttgtttccgttccggatctatagaaaactacaggtgtgataattgccttggccaattgtctttctcttttactgagtgattctagttcaccttctatagatctgagaatggatgattctccagtcgaaacatattctaccatggatccgtttaatttgttgatgaagatggattcatccttaaatgttttctctgtaatagtttccaccgaaagactatgcaaagaatttggaatgcgttccttgtgcttaatgtttccatagacggcttctagaagttgatacaacataggactagccgcggtaacttttatttttagaaagtatccatcgcttctatcttgtttagatttatttttataaagtttagtctctccttccaacataataaaagtggaagtcatttgactagataaactatcagtaagttttatagagatagacgaacaattagcgtattgagaagcatttagtgtaacgtattcgatacattttgcattagatttactaatcgattttgcatactctataacacccgcacaagtctgtagagaatcgctagatgcagtaggtcttggtgaagtttcaactctcttcttgattaccttactcatgattaaacctaaataattgtactttgtaatataatgatatatattttcactttatctcatttgagaataaaaatgtttttgtttaaccactgcatgatgtacagatttcggaatcgcaaaccaccagtggttttattttatccttgtccaatgtgaattgaatgggagcggatgcgggtttcgtacgtagatagtacattcccgtttttagaccgagactccatccgtaaaaatgcatactcgttagtttggaataactcggatctgctatatggatattcatagattgactttgatcgatgaaggctcccctgtctgcagccatttttatgatcgtcttttgtggaatttcccaaatagttttataaactcgcttaatatcttctggaaggtttgtattctgaatggatccaccatctgccataatcctattcttgatctcatcattccataattttctctcggttaaaactctaaggagatgcggattaactacttgaaattctccagacaatactctccgagtgtaaatattactggtatacggttccaccgactcattatttcccaaaatttgagcagttgatgcagtcggcataggtgccaccaataaactatttctaagaccgtatgttctgattttatcttttagaggttcccaattccaaagatccgacggtacaacattccaaagatcatattgtagaataccgttactggcgtacgatcctacatatgtatcgtatggtccttccttctcagctagttcacaactcgcctctaatgcaccgtaataaatggtttcgaagatcttcttatttagatcttgtgcttccaggctatcaaatggataatttaagagaataaacgcgtccgctaatccttgaacaccaataccgataggtctatgtctcttattagagatttcagcttctggaataggataataattaatatctataattttattgagatttctgacaattactttgaccacatccttcagtttgagaaaatcaaatcgcccatctattacaaacatgttcaaggcaacagatgccagattacaaacggctacctcattagcatccgcatattgtattatctcagtgcaaagattactacacttgatagttcctaaattttgttgattactctttttgttacacgcatccttataaagaatgaatggagtaccagtttcaatctgagattctataatcgctttccagacgactcgagcctttattatagatttgtatctcctttctctttcgtatagtgtatacaatcgttcgaactcgtctccccaaacattgtccaatccaggacattcatccggacacatcaacgaccactctccgtcatccttcactcgtttcataaagagatcaggaatccaaagagctataaatagatctctggttctatgttcctcgtttcctgtattctttttaagatcgaggaacgccataatatcagaatgccacggttccaagtatatggccataactccaggccgtttgtttcctccctgatctatgtatctagcggtgttattataaactctcaacattggaataataccgtttgatataccattggtaccggagatatagcttccactggcacgaatattactaattgatagacctattccccctgccattttagagattaatgcgcatcgttttaacgtgtcatagataccctctatgctatcatcgatcatgttaagtagaaaacagctagacatttggtgacgactagttcccgcattaaataaggtaggagaagcgtgcgtaaaccatttttcagaaagtagattgtacgtctcaatagctgagtctatatcccattgatgaattcctactgcgacacgcattaacatgtgctgaggtctttcaacgatcttgttgtttattttcaacaagtaggatttttccaaagttttaaaaccaaaatagttgtatgaaaagtctcgttcgtaaataataaccgagttgagtttatccttatatttgttaactatatccatggtgatacttgaaataatcggagaatgtttcccatttttaggattaacatagttgaataaatcctccatcacttcactaaatagtttttttgtttccttgtgtagatttgatacggctattctggcggctagaatggcataatccggatgttgtgtagtacaagtggctgctatttcggctgccagagtgtccaattctaccgttgttactccattatatattccttgaataaccttcatagctattttaataggatctatatgatccgtgtttaagccataacataattttctaatacgagacgtgattttatcaaacatgacattttccttgtatccatttcgtttaatgacaaacatttttgttggtgtaataaaaaaattatttaacttttcattaatagggatttgacgtatgtagcgtacaaaattatcgttcctggtatatagataaagagtcctatatatttgaaaatcgttacggctcgattaaactttaatgattgcatagtgaatatatcattaggatttaactccttgactatcatggcggcgccagaaattaccatcaaaagcattaatacagttatgccgatcgcagttagaacggttatagcatccaccatttatatctaaaaattagatcaaagaatatgtgacaaagtcctagttgtatactgagaattgacgaaacaatgtttcttacatatttttttcttattagtaaccgacttaatagtaggaactggaaaactagacttgattattctataagtatagatacccttccaaataatattctctttgataaaagttccagaaaatgtagaattttttaaaaagttatcttttgctattaccaagattgtgtttagacgcttattattaatatgagtgatgaaatccacaccgcctctagatatcgcttttatttccacattagatggtaaatccaatagtgaaactatctttttaggaatgtatggactcgcgtttagaggagtgaacgtcttgggcgtcggaaaggatgattcgtcaaacgaataaacaatttcacaaatggatgttaatgtattagtaggaaattttttgacgctagtggaattgaagattctaatggatgatgttctacctatttcatccgataacatgttaatttccgacaccaacggttttaatatttcgatgatatacggtagtctctctttcggacttatatagcttattccacaatacgagtcattatatactccaaaaaacaaaataactagtataaaatctgtatcgaatgggaaaaacgaaattatcgacataggtatagaatccggaacattgaacgtattaatacttaattctttttctgtggtaagtaccgataggttattgacattgtatggttttaaatattctataacttgagacttgatagatattagtgatgaattgaaaattatttttatcaccacgtgtgtttcaggatcatcgtcgacgcccgtcaaccaaccgaatggagtaaaataaatatcattaatatatgctctaaatattagtatttttattaatcctttgattatcatcttctcgtacgcgaatgattccatgatcaagagtgatttgagaacatcctccggagtattaatgggcttagtaaacagtacatcgttgcaataataaaagttatccaagttaaaggatattatgcattcgtttaaagatatcacctcatctgacggagacaattttttggtaggttttagagactttgaagctacttgtttaacaaagttattcatcgtcgtttactattctatttaattttgtagttaatttatcacatatcacattaattgactttttggtccacttttccatacgtttatattcttttaatcctgcgttatccgtttccgttatatccagtgatagatcgtgcaggttaaatagaatgctcttaaataatgtcattttcttatccgctaaaaatttaaagaatgtataaacctttttcagagatttgaaactcttaggtggtgtcctagtacacaatatcataaacaaactaataaacattccacattcagattccaacagctgattaacttctacattaatacagcctattttcgctccaaatgtacattcgaaaaatctgaataaaacatcgatgtcacaatttgtattatccaatacagaatgtctgtgattcgtgttaaaaccatcggagaaggaatagaaataaaaattattatagtggtggaattcagttggaatattgcctccggagtcataaaaggatactaaacattgttttttatcataaattacacatttccaatgagacaaataacaaaatccaaacattacaaatctagaggtagaacttttaattttgtctttaagtatatacgataagatatgtttattcataaacgcgtcaaatttttcatgaatcgctaaggagtttaagaatctcatgtcaaattgtcctatataatccacttcggatccataagcaaactgagagactaagttcttaatacttcgattgctcatccaggctcctctctcaggctctattttcatcttgacgacctttggattttcaccagtatgtattcctttacgtgataaatcatcgattttcaaatccatttgtgagaagtctatcgccttagatactttttcccgtagtcgaggtttaaagaaatacgctaacggtatactagtaggtaactcaaagacatcatatatagaatggtaacgcgtctttaactcgtcggttaactctttcttttgatcgagttcgtcgctactattgggtctgctcaggtgccccgactctactagttccaacatcataccgataggaatacaagacactttgccggcggttgtagatttatcatatttttccactacatatccgttacaatttgttaaaaatttagatacatctatattgctacataatccagctagtgaatatatatgacataataaattggtaaatcctagttctggtattttactaattactaaatctgtatatctttccatttatcatggaaaagaatttaccagatatcttcttttttccaaactgcgttaatgtattctcttacaaatattcacaagatgaattcagtaatatgagtaaaacggaacgtgatagtttctcattggccgtgtttccagttataaaacatagatggcataacgcacacgttgtaaaacataaaggaatatacaaagttagtacagaagcacgtggaaaaaaagtatctcctccatcactaggaaaacccgcacacataaacctaaccacgaaacaatatatatacagtgaacacacaataagctttgaatgttatagttttctaaaatgtataacaaatacagaaatcaattcgttcgatgagtatatattaagaggactattagaagctggtaatagtttacagatattttccaattccgtaggtaaacgaacagatactataggtgtactagggaataagtatccatttagcaaaattccattggcctcattaactcctaaagcacaacgagagatatttttagcgtggatttctcatagacctgtagttttaactggaggaactggagtgggtaagacgtcacaggtacccaagttattgctttggtttaattatttatttggtggattctctactctagataaaatcactgactttcacgaaagaccagtcattctatctcttcctaggatagctttagttagattgcatagcaataccattttaaaatcattgggatttaaggtactagatggatctcctatttctttacggtacggatctataccggaagaattaataaacaaacaaccaaaaaaatatggaattgtattttctacccataagttatctctaacaaaactatttagttatggcactcttattatagacgaagttcatgagcatgatcaaataggagatattattatagcagtagcgagaaagcatcatacgaaaatagattctatgtttttaatgactgccacgttagaggatgacagggaacggctaaaagtatttttacctaatcccgcatttatacatattcctggagatacactgtttaaaattagcgaggtatttattcataataagataaatccatcttccagaatggcatacatagaagaagaaaagagaaatttagttactgctatacagatgtatactcctcctgatggatcatccggtatagtctttgtggcatccgttgcacagtgtcacgaatataaatcatatttagaaaaaagattaccgtatgatatgtatattattcatggtaaggttttagatatagacgaaatattagaaaaagtgtattcatcacctaatgtatcgataattatttctactccttatttggaatccagcgttactatacacaatgttacacacatttatgatatgggtagagtttttgtccccgctccttttggaggatcgcaacaatttatttctaaatctatgagagatcaacgaaaaggaagagtaggaagagttaatcctggtacatacgtctatttctatgatctgtcttatatgaagtctatacagcgaatagattcagaatttctacataattatatattgtacgctaataagtttaatctaacactccccgaagatttgtttataatccctacaaatttggatattctatggcgtacaaaggaatatatagactcgttcgatattagtacagaaacatggaataaattattatccaattattatatgaagatgatagagtatgctaaactttatgtactaagtcctattctcgctgaggagttggataattttgagaggacgggagaattaactagtattgtacaagaagccattttatctctaaatttacgaattaagattttaaattttaaacataaagatgatgatacgtatatacacttttgtaaaatattattcggtgtctataacggaacaaacgctactatatattatcatagacctctaacgggatatatgaatatgatttcagatactatatttgttcctgtagataataactaaaaattaaactctaatgaccacatctttttttagagatgaaaaattttccacatctccttttgtagacacgactaaacattttgcagaaaaaagtttattagtgtttagataatcgtatacttcatcagtgtagatagtaaatgtgaacagataaaaggtattcttgctcaatagattggtaaattccatagaatatattaatcctttcttcttgagatcccacatcatttcaaccagagacgttttatccaatgatttacctcgtactataccacatacaaaactagattttgcagtgacgtcgtacctggtattcctaccaaacaaaattttacttttagttcttttagaaaattctaaggtagaatctctatttgccaatatgtcatctatggaattaccactagcaaaaaatgatagaaatatatattgatacatcgcagctggttttgatctactatactttaaaaacgaatcagattccataattgcctgtatatcatcagctgaaaaactatgttttacacgtattccttcggcatttctttttaatgatatatcttgtttagacaatgataaagttatcatgtccatgagagacgcgtctccgtatcgtataaatatttcattagatgttagacgcttcattaggggtatacttctataaggtttcttaatcagtccatcattggttgcgtcaagaactactatcggatgttgttgggtatctctagtgttacacatggccttactaaagtttgggtaaataactatgatatctctattaattatagatgcatatatttcatttgtcaaggatattagtatcgacttgctatcgtcattaatacgtgtaatgtaatcatataaatcatgcgatagccaaggaaaatttaaatagatgttcatcatataatcgtcgctataattcatattaatacgttgacattgactaatttgtaatatagcctcgccacgaagaaagctctcgtattcagtttcatcgataaaggataccgttaaatataactggttgccgatagtctcatagtctattaagtggtaagtttcgtacaaatacagaatccctaaaatattatctaatgttggattaatctttaccataactgtataaaatggagacggagtcataactattttaccgtttgtacttactggaatagatgaaggaataatctccggacatgctggtaaagacccaaatgtctgtttgaagaaatccaatgttccaggtcctaatctcttaacaaaaattacgatattcgatcccgatatcctttgcattctatttaccagcatatcacgaactatattaagattatctatcatgtctattctcccaccgttatataaatcgcctccgctaagaaacgttagtatatccatacaatggaatacttcatttctaaaatagtattcgttttctaattctttaatgtgaaatcgtatactagaaagggaaaaattatctttgagttttccgttagaaaagaaccacgaaactaatgttctgattgcgtccgattccgttgctgaattaatggatttacaccaaaaactcatataacttctagatgtagaagcattcgctaaaaaattagtagaatcaaaggatataagtagatgttccaacaagtgagcaattcccaagatttcatctatatcattctcgaatccgaaattagaaattcccaagtagatatcctttttcatccgatcgttgatgaaaatacgaactttattcggtaagacaatcatttactaaggagtaaaataggaagtaatgttcgtatgtcgttatcatcgtataaattaaaggtgtgttttttaccattaagtgacattataattttaccaatattggaattataatataggtgtatttgcgcactcgcgacggttgatgcatcggtaaatatagctgtatctaatgttctagtcggtatttcatcatttcgctgtctaataatagcgttttctctatctgtttccattacagctgcctgaagtttattggtcggataatatgtaaaataataagaaatacatacgaataacaaaaataaaataagatataataaagatgccatttagagatctaattttgttcaacttgtccaaattcctacttacagaagatgaggaatcgttggagatagtgtcttccttatgtagaggatttgaaatatcttatgatgacttgataacttactttccagataggaaataccataaatatatttataaagtatttgaacatgtagatttatcggaggaattaagtatggaattccatgatacaactctgagagatttagtctatcttagattgtacaagtattccaagtgtatacggccgtgttataaattaggagataatctaaaaggcatagttgttataaaggacaggaatatttatattagggaagcaaatgatgacttgatagaatatctcctcaaggaatacactcctcagatttatacatattctaatgagcgagttcccatagctggttcaaaattaattctttgtggattttctcaagttacatttatggcgtatacaacgtcgcatataacaacaaataaaaaggtagatgttctcgtttccaaaaaatgtatagatgaactagtcgatccaataaattatcaaatacttcaaaatttatttgataaaggaagcggaacaataaacaaaatactcaggaagatattttattcggtaacaggtggccaaactccataggtagctttttctatttcggattttagaatttccaaattcaccagcgatttatcggttttggtgaaatccaaggatttattaatgtccacaaatgccatttgttttgtctgtggattgtatttgaaaatggaaacgatgtagttagatagatgcgctgcaaagtttcctattagggttccgcgctttacgtcacccagcatacttgaatcaccatcctttaaaaaaaatgataagatatcaacatggagtatatcatactcggattttaattcttctactgactcactgacattttcacaaatactacaatacggtttaccgaaaataatcaatacgttcttcatttatgggtatcaaaaacttaaaatcgttactgctggaaaataaatcactgacgatattagatgataatttatacaaagtatacaatggaatatttgtggatacaatgagtatttatatagccgtcgccaattgtgtcagaaacttagaagagttaactacggtattcataaaatacgtaaacggatgggtaaaaaagggagggcatgtaaccctttttatcgatagaggaagtataaaaattaaacaagacgttagagacaagagacgtaaatattctaaattaaccaaggacagaaaaatgttagaattagaaaagtgtacatccgaaatacaaaatgttaccggatttatggaagaagaaataaaggcaaaaatgcaattaaaaatcgataaacttacatttcaaatatatttatctgattctgataacataaaaatatcattgaatgagatactaacacatttcaacaataatgagaatgttacattattttattgtgatgaacgagacgcagaattcgttatgtgtctcgaggctaaaacacatttctctaccacaggagaatggccgttgataataagtaccgatcaggatactatgctatttgcatctgctgataatcatcctaagatgataaaaaacttaactcaactgtttaaatatgttccatctgcagaggataactatttagcaaaattaacggcgttagtgaatggatgtgatttctttcctggactctatggggcatctataacacccaacaacttaaacaaaatacaattgtttagtgattttacaatcgataatatagtcactagtttggcaattaaaaattattatagaaagactaactctaccgtagacgtgcgtaatattgttacgtttataaacgattacgctaatttagacgatgtctactcgtatgttcctccttgtcaatgcactgttcaagaatttatattttccgcattagatgaaaaatggaacaattttaaatcatcttatttagaaaccgttccgttaccctgtcaattaatgtacgcgttagaaccacgtaaggagattgatgtttcagaagttaaaactttatcatcttatatagatttcgaaaatactaaatcagatatcgatgttataaaatctatatcctcgatttttggatattctaacgaaaactgtaacactatagtgttcggcatctataaggataatttactactgagtataaatagttcattttactttaacgatagtctgttaataaccaatactaaaagtgataatataataaatataggttactagattaaaaatggtgttccaactcgtgtgctctacatgcggtaaagatatttctcacgaacgatataaattgattatacgaaaaaaatcattaaaggatgtactcgtcagtgtaaagaacgaatgttgtaggttaaaattatctacacaaatagaacctcaacgtaacttaacagtgcaacctctattggatataaactaatatggatccggttaattttatcaagacatatgcgcctagaggttctattatttttattaattataccatgtcattaacaagtcatttgaatccatcgatagaaaaacatgtgggtatttattatggtacgttattatcggaacacttggtagttgaatctacctatagaaaaggagttcgaatagtcccattggatagtttttttgaaggatatcttagtgcaaaagtatacatgttagagaatattcaagttatgaaaatagcagctaatacgtcattaactttattgggtattccgtatggatttggtcataatagaatgtattgttttaaattggtagctgaatgttataaaaatgccggtattgatacatcgtctaaacgaatattgggcaaagatatttttctgagccaaaacttcacagacgataatagatggataaagatatatgattctaataatttaacattttggcaaattgattaccttaaagggtgagttaatatgcataactactcctccgttgttttttccctcgttctttttcttaacgttgtttgccatcactctcataatgtaaagatattctaaaatggtaaacttttgcatatcggacgcagaaattggtataaatgttgtaattgtattatttcccgtcaatggactagtcacagctccatcagttttatatcctttagagtatttctcactcgtgtctaacattctagagcattccatgatctgtttatcgttgatattggccggaaagatagattttttattttttattatattactattggcaattgtagatataacttctggtaaatatttttctaccttttcaatctcttctattttcaagccggctatatattctgctatattgttgctagtatcaataccttttcttgctaagaagtcatatgtggtattcactatatcagttttaactggtagttccattagcctttccacttctgcagaataatcagaaattggttctttaccagaaaatccagctactataataggctcaccgatgatcattggcaaaatcctatattgtaccagattaatgagagcatatttcatttccaataattctgctagttcttgagacattgatttatttgatgaatctagttggttctctagatactctaccatttctgccgcatacaataacttgttagataaaatcagggttatcaaagtgtttagcgtggctagaatagtgggcttgcatgtattaaagaatgcggtagtatgagtaaaccgttttaacgaattatatagtctccagaaatctgtggcgttacatacatgagccgaatgacatcgaagattgtccaatatttttaatagctgctctttgtccattatttctatatttgactcgcaacaattgtaaataccattaatcactgattcctttttcgatgccggacaatagcacaattgtttagctttggactctatgtattcagaattaatagatatatctcttaatacagattgcactatacattttgaaactatgtcaaaaattgtagaacgacgctgttctgcagccatttaactttaaataatttacaaaaatttaaaatgagcatccgtataaaaatcgataaactgcgccaaattgtggcatatttttcagagttcagtgaagaagtgtctataaatgtagactcgacggatgagttaatgtatatttttgccgccttgggcggatctgtaaacatttgggccattatacctctcagtgcatcagtgttctaccgcggagccgaaaatattgtgtttaatcttccggtgtccaaggtaaaatcgtgtttgtgtagttttcacaatgatgccatcatagatatagaacctgatctgaaaaataatctagtaaaactttctagttatcatgtagtaagtgtcgattgtaacaaggaactgatgcctattaggacagatactactatttgtctaagtatagatcaaaagaaatcttatgtgtttaattttcacaagtatgaagaaaaatgttgtggtagaaccgtcattcatctagaatggttgttgggctttatcaagtgtattagtcagcatcagcatctggctattatgtttaaagatgacaatattattatgaagactcctggtaatactgatgcattttccagggaatattctatgactgaatgttctcaagaactacaaaagttttctttcaaaatagctatctcgtctctcaacaaactacgaggattcaaaaagagagtcaatgtttttgaaactagaatcgtaatggataatgacgataacattttaggaatgttgttttcggatagagttcaatcctttaagatcaacatctttatggcgtttttagattaatactttcaatgagataaatatgggtggcggagtaagtgttgagctccctaaacgggatccgcctccgggagtacccactgatgagatgttattaaacgtggataaaatgcatgacgtgatagctcccgctaagcttttagaatatgtgcatataggaccactagcaaaagataaagaggataaagtaaagaaaagatatccagagtttagattagtcaacacaggacccggtggtctttcggcattgttaagacaatcgtataatggaaccgcacccaattgctgtcgcacttttaatcgtactcattattggaaaaaggatggaaagatatcagataagtatgaagagggtgcagtattagaatcgtgttggccagacgttcacgacactggaaaatgcgatgttgatttattcgactggtgtcagggggatacgttcgatagaaacatatgccatcagtggatcggttcagcctttaataggagtgatagaactgtagagggtcaacaatcgttaataaatctgtataataagatgcaaacattatgtagtaaagatgctagtgtaccaatatgtgaatcatttttgcatcatttacgcgcacacaatacagaagatagcaaagagatgatcgattatattctaagacaacagtctgcggactttaaacagaaatatatgagatgtagttatcccactagagataagttagaagagtcattaaaatatgcggaacctcgagaatgttgggatccagagtgttcgaatgccaatgttaatttcttgctaacacgtaattataataatttaggactttgcaatattgtacgatgtaataccagcgtgaacaacttacagatggataaaacttcctcattaagattgtcatgtggattaagcaatagtgatagattttctactgttcccgtcaatagagcaaaagtagttcaacataatattaaacattcgttcgacctaaaattgcatttgatcagtttattatctctcttggtaatatggatactaattgtagctatttaaatgggtgccgcggcaagcatacagacgacggtgaatacactcagcgaacgtatctcgtctaaattagaacaagaagcgaacgctagtgctcaaacaaaatgtgatatagaaatcggaaatttttatatccgacaaaaccatggatgtaacctcactgttaaaaatatgtgctctgcggacgcggatgctcagttggatgctgtgttatcagccgctacagaaacatatagtggattaacaccggaacaaaaagcatacgtgccagctatgtttactgctgcgttaaacattcagacgagtgtaaacactgttgttagagattttgaaaattatgtgaaacagacttgtaattctagcgcggtcgtcgataacaaattaaagatacaaaacgtaatcatagatgaatgttacggagccccaggatctccaacaaatttggaatttattaatacaggatctagcaaaggaaattgtgccattaaagcgttgatgcaattgacgactaaggccactactcaaatagcacctagacaagttgctggtacaggagttcagttttatatgattgttatcggtgttataatattggcagcgttgtttatgtactatgccaagcgtatgttgttcacatccaccaatgataaaatcaaacttattttagccaataaggaaaacgtccattggactacttacatggacacattctttagaacttctccgatggttattgctaccacggatatgcaaaactgaaaatatattgataatattttaatagattaacatggaagttatcgctgatcgtctagacgatatagtgaaacaaaatatagcggatgaaaaatttgtagattttgttatacacggtctagagcatcaatgtcctgctatacttcgaccattaattaggttgtttattgatatactattatttgttatagtaatttatatttttacggtacgtctagtaagtagaaattatcaaatgttgttggtggtgctagtcatcacattaactattttttattactttatactataatagtactagactgacttctaacaaacatctcacccgccataaataaatgcttgatattaaagtcttctatttctaacactattccatctgtggaaaataatactctgacattatcgctaattgacacatcggtgagtgatatgcctataaagtaataatcttctttgggcacatataccagtgtaccaggttctaacaacctatttactggtgctcctgtagcatactttttctttaccttgagaatatccatcgtttgcttggtcaatagcgatatgtgattttttatcaaccactcgaaaaagtaattggagtgttcatatcctctacgggctattgtctcatggccgtgtatgaaatttaagtaacacgactgtggtagatttgttctatagagccggttgccgcaaatagatagaactaccaatatgtctgtacaaatgttaaacattaattgattaacagaaaaaacaatgttcgttctgggaatagaaaccagattaaaacaaaattcgttagaatatatgccacgtttatacatggaatataaaataactacagtttgaaaaataacagtatcatttaaacatttaacttgcggggttaatttcacaactttactgtttttgaactgttcaaaatatagcatcgatccatgagaaatacgtttagccgcctttaatagaggaaatcccaccgcctttctggatctcaccaacgacgatagttctgaccagcaactcatttcttcatcatccacctgttttaacatataataggcaggagatagatatccgtcattgcaatattccttctcgtaggcacacaatctaatattgataaaatctccattctcttctctgcatttattatcttgtttcggtggctgattaggctgtagtcttggtttaggctttggtatatcgttgttgaatctattttggtcattaaatctttcatttcttcctggtatatttctatcacctcgtttggttggatttttgtctatattatcgtttgtaacatcggtacgggtattcatttatcacaaaaaaaacttctctaaatgagtctactgctagaaaacctcatcgaagaagataccatattttttgcaggaagtatatctgagtatgatgatttacaaatggttattgccggcgcaaaatccaaatttccaagatctatgctttctatttttaatatagtacctagaacgatgtcaaaatatgagttggagttgattcataacgaaaatatcacaggagcaatgtttaccacaatgtataatataagaaacaatttgggtctaggcgatgataaactaactattgaagccattgaaaactatttcttggatcctaacaatgaggttatgcctcttatcattaataatacggatatgactgccgtcattcctaaaaaaagtggtaggagaaagaataagaacatggttattttccgtcaaggatcatcacctatcttgtgtattttcgaaactcgtaaaaagattaatatttataaagaaaatatggaatccgcgtcgactgagtatacacctatcggagacaacaaggctttgatatctaaatatgcgggaattaatgtcctgaatgtgtattctccttccacatccatgagattgaatgccatttacggattcaccaataaaaataaactagagaaacttagtactaataaggaactagaatcgtatagttctagccctcttcaagaacccattaggttaaatgattttctgggactattggaatgtgttaaaaagaatattcctctaacagatattccgacaaaggattgattactataaatggagaatgttcctaatgtatactttaatcctgtgtttatagagcccacgtttaaacattctttattaagtgtttataaacacagattaatagttttatttgaagtattcgttgtattcattctaatatatgtattttttagatctgaattaaatatgttcttcatgcctaaacgaaaaatacccgatcctattgatagattacgacgtgctaatctagcgtgtgaagacgataaattaatgatctatggattaccatggatgacaactcaaacatctgcgttatcaataaatagtaaaccgatagtgtataaagattgtgcaaagcttttgcgatcaataaatggatcacaaccagtatctcttaacgatgttcttcgcagatgatgattcattttttaagtatttggctagtcaagatgatgaatcttcattatctgatatattgcaaatcactcaatatctagactttctgttattattattgatccaatcaaaaaataaattagaagccgtgggtcattgttatgaatctctttcagaggaatacagacaattgacaaaattcacagactctcaagattttaaaaaactgtttaacaaggtccctattgttacagatggaagggtcaaacttaataaaggatatttgttcgactttgtgattagtttgatgcgattcaaaaaagaatcagctctagctaccaccgcaatagatcctgttagatacatagatcctcgtcgcgatatcgcattttctaacgtgatggatatattaaagtcgaataaagtgaacaataattaattctttattgtcatcaaaaattgaaattttattttttttttttggaatataaatatatctagcgctaccggtcgccaccatggtgagcaagggcgaggagctgttcaccggggtggtgcccatcctggtcgagctggacggcgacgtaaacggccacaagttcagcgtgtccggcgagggcgagggcgatgccacctacggcaagctgaccctgaagttcatctgcaccaccggcaagctgcccgtgccctggcccaccctcgtgaccaccttcggctacggcctgcagtgcttcgcccgctaccccgaccacatgaagcagcacgacttcttcaagtccgccatgcccgaaggctacgtccaggagcgcaccatcttcttcaaggacgacggcaactacaagacccgcgccgaggtgaagttcgagggcgacaccctggtgaaccgcatcgagctgaagggcatcgacttcaaggaggacggcaacatcctggggcacaagctggagtacaactacaacagccacaacgtctatatcatggccgacaagcagaagaacggcatcaaggtgaacttcaagatccgccacaacatcgaggacggcagcgtgcagctcgccgaccactaccagcagaacacccccatcggcgacggccccgtgctgctgcccgacaaccactacctgagctaccagtccgccctgagcaaagaccccaacgagaagcgcgatcacatggtcctgctggagttcgtgaccgccgccgggatcactctcggcatggacgagctgtacaagtccggactcaggtctagacggattcagatgacacttcacatgagcgaaaaatacatcgtcacctgggacatgttgcagatccatgcacgtaaactcgcaagccgactgatgccttctgaacaatggaaaggcattattgccgtaagccgtggcggtctggtaccgggtgcgttactggcgcgtgaactgggtattcgtcatgtcgataccgtttgtatttccagctacgatcacgacaaccagcgcgagcttaaagtgctgaaacgcgcagaaggcgatggcgaaggcttcatcgttattgatgacctggtggataccggtggtactgcggttgcgattcgtgaaatgtatccaaaagcgcactttgtcaccatcttcgcaaaaccggctggtcgtccgctggttgatgactatgttgttgatatcccgcaagatacctggattgaacagccgtgggatatgggcgtcgtattcgtcccgccaatctccggtcgctaatgatagtattatattttttatctaaaaaactaaaaataaacattgattaaattttaatataatacttaaaaatggatgttgtgtcgttagataaaccgtttatgtattttgaggaaattgataatgagttagattacgaaccagaaagtgcaaatgaggtcgcaaaaaaactgccgtatcaaggacagttaaaactattactaggagaattattttttcttagtaagttacagcgacacggtatattagatggtgccaccgtagtgtatataggatctgctcccggtacacatatacgttatttgagagatcatttctataatttaggagtgatcatcaaatggatgctaattgacggccgccatcatgatcctattttaaatggattgcgtgatgtgactctagtgactcggttcgttgatgaggaatatctacgatccatcaaaaaacaactgcatccttctaagattattttaatttctgatgtgagatccaaacgaggaggaaatgaacctagtacggcggatttactaagtaattacgctctacaaaatgtcatgattagtattttaaaccccgtggcatctagtcttaaatggagatgcccgtttccagatcaatggatcaaggacttttatatcccacacggtaataaaatgttacaaccttttgctccttcatattcagctgaaatgagattattaagtatttataccggtgagaacatgagactgactcgagttaccaaattagacgctgtaaattatgaaaaaaagatgtactaccttaataagatcgtccgtaacaaagtagttgttaactttgattatcctaatcaggaatatgactattttcacatgtactttatgctgaggaccgtgtactgcaataaaacatttcctactactaaagcaaaggtactatttctacaacaatctatatttcgtttcttaaatattccaacaacatcaactgaaaaagttagtcatgaaccaatacaacgtaaagtatctagcaaagattttatgtctaaaaacagaaatagcaagagatccgtacgcagtaataaatagaaatagggataacagggtaat

SEQ ID NO: 58 - DNA, 26077 bp, Vaccinia virus
tagggataacagggtaattattatattttttatctaaaaaactaaaaataaacattgattaaattttaatataatacttaaaaatggatgttgtgtcgttagataaaccgtttatgtattttgaggaaattgataatgagttagattacgaaccagaaagtgcaaatgaggtcgcaaaaaaactgccgtatcaaggacagttaaaactattactaggagaattattttttcttagtaagttacagcgacacggtatattagatggtgccaccgtagtgtatataggatctgctcccggtacacatatacgttatttgagagatcatttctataatttaggagtgatcatcaaatggatgctaattgacggccgccatcatgatcctattttaaatggattgcgtgatgtgactctagtgactcggttcgttgatgaggaatatctacgatccatcaaaaaacaactgcatccttctaagattattttaatttctgatgtgagatccaaacgaggaggaaatgaacctagtacggcggatttactaagtaattacgctctacaaaatgtcatgattagtattttaaaccccgtggcatctagtcttaaatggagatgcccgtttccagatcaatggatcaaggacttttatatcccacacggtaataaaatgttacaaccttttgctccttcatattcagctgaaatgagattattaagtatttataccggtgagaacatgagactgactcgagttaccaaattagacgctgtaaattatgaaaaaaagatgtactaccttaataagatcgtccgtaacaaagtagttgttaactttgattatcctaatcaggaatatgactattttcacatgtactttatgctgaggaccgtgtactgcaataaaacatttcctactactaaagcaaaggtactatttctacaacaatctatatttcgtttcttaaatattccaacaacatcaactgaaaaagttagtcatgaaccaatacaacgtaaagtatctagcaaagattttatgtctaaaaacagaaatagcaagagatccgtacgcagtaataaatagaaacgtactactgagatatactaccgatatagagtataatgatttagttactttaataaccgttagacataaaattgattctatgaaaactgtgtttcaggtatttaacgaatcatccataaattatactccggttgatgatgattatggagaaccaatcattataacatcgtatcttcaaaaaggtcataacaagtttcctgtaaattttctatacatagatgtggtaatatctgacttatttcctagctttgttagactagatactacagaaactaatatagttaatagtgtactacaaacaggtgatggtaaaaagactcttcgtcttcccaaaatgttagagacggaaatagttgtcaagattctctatcgccctaatataccattaaaaattgttagatttttccgcaataacatggtaactggagtagagatagccgatagatctgttatttcagtcgctgattaatcaattagtagagatgagataagaacattataataatcaataatattatcttatatcttgtttagaaaaatgctaatattaaaatagctaacgctagtaatccaatcggaagccatttgatatctataatagggtatctaatttcctgattcagatagcggacagctatattctcggtagctactcgtttggaatcacaaacattatttacatctaatttactatctgtaatggaaacgtttcccaatgaaatggtacaatccgatacattgcattttgttatatttttttttaaagaggctggtaacaacgcatcgcttcgtttacatggctcgtaccaacaataatagggtaatcttgtatctattcctatccgtactatgcttttatcaggataaatacatttacatcgtatatcgtctttgttagcatcacagaatgcataaatttgttcgtccgtcatgataaaaatttaaagtgtaaatataactattatttttatagttgtaataaaaagggaaatttgattgtatactttcggttctttaaaagaaactgacttgataaaaatggctgtaatctctaaggttacgtatagtctatatgatcaaaaagagattaatgctacagatattatcattagtcatgttaaaaatgacgacgatatcggtaccgttaaagatggtagactaggtgctatggatggggcattatgtaagacttgtgggaaaacggaattggaatgtttcggtcactggggtaaagtaagtatttataaaactcatatagttaagcctgaatttatttcagaaattattcgtttactgaatcatatatgtattcactgcggattattgcgttcacgagaaccgtattccgacgatattaacctaaaagagttatcgggacacgctcttaggagattaaaggataaaatattatccaagaaaaagtcatgttggaacagtgaatgtatgcaaccgtatcaaaaaattactttttcaaagaaaaaggtttgtttcgtcaacaagttggatgatattaacgttcctaattctctcatctatcaaaagttaatttctattcatgaaaagttttggccattattagaaattcatcaatatccagctaacttattttatacagactactttcccatccctccgttgattattagaccggctattagtttttggatagatagtatacccaaagaaaccaatgaattaacttacttattaggtatgatcgttaagaattgtaacttgaatgctgatgaacaggttatccagaaggcggtaatagaatacgatgatattaaaattatttctaataacactaccagtattaatttatcatatatcacatccggcaaaaataatatgattagaagttatatcgtcgcccggcgaaaagatcagaccgctagatctgtaattggtcccagtacatctatcaccgttaatgaggtaggaatgcccgcatatattagaaatacacttacagaaaagatatttgttaatgcctttacagtggataaagttaaacaactattagcatcaaaccaagttaaattttactttaataaacgattaaaccaattaacaagaatacgccaaggaaagtttattaaaaataaaatacatttattgcctggtgattgggtagaagtagctgttcaagaatatacaagtattatttttggaagacagccgtctctacatagatacaacgtcatcgcttcatctatcagagctaccgaaggagatactatcaaaatatctcccggaattgccaactctcaaaatgctgatttcgacggggatgaggaatggatgatattagaacaaaatcctaaagctgtaattgaacaaagtattcttatgtatccgacgacgttactcaaacacgatattcatggagcccctgtttatggatctattcaagatgaaatcgtagcagcgtattcattgtttaggatacaagatctttgtttagatgaagtattgaacatcttggggaaatatggaagagagttcgatcctaaaggtaaatgtaaattcagcggtaaagatatctatacttacttgataggtgaaaagattaattatccgggactcttaaaggatggtgaaattattgcaaacgacgtagatagtaattttgttgtggctatgaggcatctgtcattggctggactcttatccgatcataagtcgaacgtggaaggtatcaactttattatcaagtcatcttatgtttttaagagatatctatctatttacggttttggggtgacattcaaagatctcagaccaaattcgacgttcactaataaattggaggccatcaacgtagaaaaaatagaacttatcaaagaagcatacgccaaatatctcaacgatgtaagagacgggaaaatagttccattatctaaagctttagaggcggactatgtggaatccatgttatccaacttgacaaatcttaatatccgagagatagaagaacatatgagacaaacgctgatagatgatccagataataacctcctgaaaatggccaaagcgggttataaagtaaatcccacagaactaatgtatattctaggtacttatggacaacagaggattgatggtgaaccagcagagactcgagtattgggtagagttttaccttactatcttccagactctaaggatccagaaggaagaggttatattcttaattctttaacaaaaggattaacaggttctcaatattacttttcgatgctggttgcaagatctcaatctactgatatcgtctgtgaaacatcacgtaccggaacactggctagaaaaatcattaaaaagatggaggatatggtggtcgacggatacggacaagtagttataggtaatacgctcatcaagtacgccgccaattataccaaaattctaggctcagtatgtaaacctgtagatcttatctatccagatgagtccatgacttggtatttggaaattagtgctctgtggaataaaataaaacagggattcgtttactctcagaaacagaaacttgcaaaaaagacattggcgccgtttaatttcctagtattcgtcaaacccaccactgaggataatgctattaaggttaaggatctgtacgatatgattcataacgtcattgatgatgtgagagagaaatacttctttacggtatctaatatagattttatggagtatatattcttgacgcatcttaatccttctagaattagaattacaaaagaaacggctatcactatctttgaaaagttctatgaaaaactcaattatactctaggtggtggaactcctattggaattatttctgcacaggtattgtctgagaagtttacacaacaagccctgtccagttttcacactactgaaaaaagtggtgccgtcaaacaaaaacttggtttcaacgagtttaataacttgactaatttgagtaagaataagaccgaaattatcactctggtatccgatgatatctctaaacttcaatctgttaagattaatttcgaatttgtatgtttgggagaattaaatccaaacatcactcttcgaaaagaaacagataaatatgtagtagatataatagttaatagattatacatcaagagagcagaaataaccgaattagttgtcgaatatatgattgaacgatttatctcctttagcgtcattgtaaaggaatggggtatggagacattcattgaggacgaggataatattagatttactgtctatctaaatttcgttgaaccagaggaattgaatcttagtaagtttatgatggttcttccgggggcagccaacaagggaaagattagtaaattcaagattcctatctctgactatacgggatatgacgacttcaatcaaacaaaaaagctcaataagatgactgtagaactcatgaatctaaaagaattgggttctttcgatttggaaaacgtcaacgtgtatcctggagtatggaatacatacgatatcttcggtatcgaggccgctcgtgaatacttgtgcgaagccatgttaaacacctatggagaagggttcgattatctgtatcagccttgtgatcttctcgctagtttactatgtgctagttacgaaccagaatcagtgaataaattcaagttcggcgcagctagtactcttaagagagctacgttcggagacaataaagcattgttaaacgcggctcttcataaaaagtcagaacctattaacgataatagtagctgccacttttttagcaaggtccctaatataggaactggatattacaaatactttatcgacttgggtcttctcatgagaatggaaaggaaactatctgataagatatcttctcaaaagatcaaggaaatggaagaaacagaagacttttaattcttatcaataacatatttttctatgatctgtcttttaaacgatggattttccacaaatgcgcctctcaagtccctcatagaatgatacacgtataaaaaatatagcataggcaatgactccttatttttagacattagatatgccaaaatcatagccccgcttctatttactcccgcagcacaatgaaccaacacgggctcgtttcgttgatcacatttagataaaaaggcggttacgtcgtcaaaatatttactaatatcggtagttgtatcatctaccaacggtatatgaataatattaatattagagttaggtaatgtatatttatccatcgtcaaatttaaaacatatttgaacttaacttcagatgatggtgcatccatagcatttttataatttcccaaatacacattattggttacccttgtcattatagtgggagatttggctctgtgcatatctccagttgaacgtagtagtaagtatttatacaaacttttcttatccatttataacgtacaaatggataaaactactttatcggtaaacgcgtgtaatttagaatacgttagagaaaaggctatagtaggcgtacaagcagccaaaacatcaacacttatattctttgttattatattggcaattagtgcgctattactctggtttcagacgtctgataatccagtctttaatgaattaacgagatatatgcgaattaaaaatacggttaacgattggaaatcattaacggatagcaaaacaaaattagaaagtgatagaggtagacttctagccgctggtaaggatgatatattcgaattcaaatgtgtggatttcggcgcctattttatagctatgcgattggataagaaaacatatctgccgcaagctattaggcgaggtactggagacgcgtggatggttaaaaaggcggcaaaggtcgatccatctgctcaacaattttgtcagtatttgataaaacacaagtctaataatgttattacttgtggtaatgagatgttaaatgaattaggttatagcggttattttatgtcaccgcattggtgttccgattttagtaatatggaatagtgttagataaatgcggtaacgaatgttcctgtaaggaaccataacagcttagatttaacgttaaagatgagcataaacataataaacaaaattacaatcaaacctataacattaatatcaaacaatccaaaaaatgaaatcagtggagtagtaaacgcgtacataactcctggataacgtttagcagctgccgttcctattctagaccaaaaattcggtttcatgttttcgaagcggtgttctgcaacaagtcggggatcgtgttctacatatttggcggcgttatccagtatctgcctattgatcttcatttcgttttcgattctggctatttcaaaataaaatcccgatgatagacctccagactttataatttcatctacgatgttcagcgccgtagtaactctaataatataggctgataagctaacatcataccctcctgtatatgtgaatatggcatgatttttgtccattacaagctcggttttaactttattgcctgtaataatttctctcatctgtaggatatctatttttttgtcatgcattgccttcaagacgggacgaagaaacgtaatatcctcaataacgttatcgttttctacaataactacatattctacctttttattttctaactcggtaaaaaaattagaatcccatagggctaaatgtctagcgatatttcttttcgtttcctctgtacacatagtgttacaaaaccctgaaaagaagtgagtatacttgtcatcatttctaatgtttcctccagtccactgtataaacgcataatccttgtaatgatctggatcatccttgactaccacaacatttcttttttctggcataacttcgttgtcctttacatcatcgaacttctgatcattaatatgctcatgaacattaggaaatgtttctgatggaggtctatcaataactggcacaacaataacaggagttttcaccgccgccatttagttattgaaattaatcatatacaactctttaatacgagttatattttcgtctatccattgtttcacatttacatatttcgacaaaaagatataaaatgcgtattccaatgcttctctgtttaatgaattactaaaatatacaaacacgtcactgtctggcaataaatgatatcttagaatattgtaacaatttattttgtattgcacatgttcgtgatctatgagttcttcttcgaatggcataggatctccgaatctgaaaacgtataaataggagttagaataataatatttgagagtattggtaatatataaactctttagcggtataattagtttttttctctcaatttctatttttagatgtgatggaaaaatgactaattttgtagcattagtatcatgaactctaatcaaaatcttaatatcttcgtcacacgttagctctttgaagtttttaagagatgcatcagttggttctacagatggagtaggtgcaacaattttttgttctacacatgtatgtactggagccattgttttaactataatggtgcttgtatcgaaaaactttaatgcagatagcggaagctcttcgccgcgactttctacatcgtaattgggttctaacgccgatctctgaatggatactagttttctaagttctaatgtgattctctgaaaatgtaaatccaattcctccggcattatagatgtgtatacatcggtaaataaaactatagtatccaacgatcccttctcgcaaattctagtcttaaccaaaaaatcgtatataaccacggagatggcgtatttaagagtggattcttctaccgttttgttcttggatgtcatataggaaactataaagtccgcactactgttaagaatgattactaacgcaactatatagttcaaattaagcattttggaaacataaaataactctgtagacgatacttgactttcgaataagtttgcagacaaacgaagaaagaacagacctctcttaatttcagaagaaaactttttttcgtattcctgacgtctagagtttatatcaataagaaagttaagaattagtcggttaatgttgtatttcattacccaagtttgagatttcataatattatcaaaagacatgataatattaaagataaagcgctgactatgaacgaaatagctatatggttcgctcaagaatatagtcttgttaaacgtggaaacgataactgtatttttaatcacgtcagcggcatctaaattaaatataggtatatttattccacacactctacaatatgccacaccatcttcataataaataaattcgttagcaaaattattaattttagtgaaatagttagcgtcaactttcatagcttccttcaatctaatttgatgctcacacggtgcgaattccactctaacatcccttttccatgcctcaggttcatcgatctctataatatctagttttttgcgtttcacaaacacaggctcgtctctcgcgatgagatctgtatagtaactatgtaaatgataactagatagaaagatgtagctatatagatgacgatcctttaagagaggtataataactttaccccaatcagatagactgttgttatggtcttcggaaaaagaatttttataaatttttccagtattttccaaatatacgtacttaacatctaaaaaatccttaatgataataggaatggataatccgtctattttataaagaaatacatatcgcacattatacttttttttggaaatgggaataccgatgtgtctacataaatatgcaaagtctaaatattttttagagaatcttagttggtccaaattcttttccaagtacggtaatagatttttcatattgaacggtatcttcttaatctctggttctagttccgcattaaatgatgaaactaagtcactatttttataactaacgattacatcacctctaacatcatcatttaccagaatactgatcttcttttgtcgtaaatacatgtctaatgtgttaaaaaaaagatcatacaagttatacgtcatttcatctgtggtattcttgtcattgaaggataaactcgtactaatctcttctttaacagcctgttcaaatttatatcctatatacgaaaaaatagcaaccagtgtttgatcatccgcgtcaatattctgttctatcgtagtgtataacaatcgtatatcttcttctgtgatagtcgatacgttataaaggttgataacgaaaatatttttatttcgtgaaataaagtcatcgtaggattttggacttatattcgcgtctagtagatatgcttttatttttggaatgatctcaattagaatagtctctttagagtccatttaaagttacaaacaactaggaaattggtttatgatgtataatttttttagtttttatagattctttattctatacttaaaaaatgaaaataaatacaaaggttcttgagggttgtgttaaattgaaagcgagaaataatcataaattatttcattatcgcgatatccgttaagtttgtatcgtaatggcgtggtcaattacaaataaagcggatactagtagcttcacaaagatggctgaaatcagagctcatctaaaaaatagcgctgaaaataaagataaaaacgaggatattttcccggaagatgtaataattccatctactaagcccaaaaccaaacgagccactactcctcgtaaaccagcggctactaaaagatcaaccaaaaaggaggaagtggaagaagaagtagttatagaggaatatcatcaaacaactgaaaaaaattctccatctcctggagtcggcgacattgtagaaagcgtggctgctgtagagctcgatgatagcgacggggatgatgaacctatggtacaagttgaagctggtaaagtaaatcatagtgctagaagcgatctttctgacctaaaggtggctaccgacaatatcgttaaagatcttaagaaaattattactagaatctctgcagtatcgacggttctagaggatgttcaagcagctggtatctctagacaatttacttctatgactaaagctattacaacactatctgatctagtcaccgagggaaaatctaaagttgttcgtaaaaaagttaaaacttgtaagaagtaaatgcgtgcacttttttataaagatggtaaactctttaccgataataattttttaaatcctgtattagatgataatccagcgtatgaggttttgcaacatgttaaaattcctactcatttaacagatgtagtagtatatgaacaaacgtgggaagaggcattaactagattaatttttgtgggaagcgattcaaaaggacgtagacaatacttttacggaaaaatgcatgtacagaatcgcaacgctaaaagagatcgtatttttgttagagtatataacgttatgaaacgaattaattgttttataaacaaaaatataaagaaatcgtccacagattccaattatcagttggcggtttttatgttaatggaaactatgttttttattagatttggtaaaatgaaatatcttaaggagaatgaaacagtagggttattaacactaaaaaataaacacatagaaataagtcccgatgaaatagttatcaagtttgtaggaaaggacaaagtttcacatgaatttgttgttcataagtctaatagactatataaaccgctattgaaactgacggatgattctagtcccgaagaatttctgttcaacaaactaagtgaacgaaaggtatacgaatgtatcaaacagtttggtattagaatcaaggatctccgaacgtatggagtcaattatacgtttttatataatttttggacaaatgtaaagtccatatctcctcttccgtcaccaaaaaagttaatagcattaactatcaaacaaactgctgaagttgtaggtcatactccatcaatttcaaaaagagcttatatggcaacgactattttagaaatggtaaaggataaaaattttttagatgtagtatctaaaactacgttcgatgaattcctatctatagtcgtagatcacgttaaatcatctacggatggatgatatagatctttacacaaataattacaagaccgataaatggaaatggataagcgtataaaatctctcgcaatgaccgctttctttggggagctaagcacattagatattatggcattgataatgtctatatttaaacgccatccaaacaataccattttttcagtggataaggatggtcagtttatgattgatttcgaatacgataattataaggcttctcaatatttggatctgaccctcactccgatatttggagatgaatgcaagactcacgcatcgagtatagccgaacaattggcgtgtgcggatattattaaagaggatattagcgaatacatcaaaactactccccgtcttaaacgatttataaaaaaataccgcaatagatcagatactcgtatcagtcgagatacagaaaagcttaaaatagctctagctaaaggcatagattacgaatatataaaagacgcttgttaataagtaaatgaaaaaaaactagtcgtttataataaaacacgatatggatgccaacgtagtatcatcttctactattgcaacgtatatagacgctttagcgaagaatgcttcagaattagaacagaggtctaccgcatacgaaataaataatgaattggaactagtatttattaagccgccattaattactttgacaaatgtagtgaatatctctacgattcaggaatcgtttattcgatttaccgttactaataaggaaggtgtcaaaattagaactaagattccattatctaaggtacatggtctagatgtaaaaaatgtacagttagtagatgctatagataacatagtttgggaaaagaaatcattagtgacggaaaatcgtcttcacaaagaatgcttgttgagactatcgacagaggaacgtcatatatttttggattacaagaaatatggatcctctatccgactagaattagtcaatcttattcaagcaaaaacaaaaaactttacgatagactttaagctaaaatattttctaggatccggtgcccaatctaaaagttctttgttgcacgctattaatcatccaaagtcaaggcctaatacatctctggaaatagaattcacacctagagacaatgaaacagttccatatgatgaactaataaaggaattgacgactctctcgcgtcatatatttatggcttctccagagaatgtaattctttctccgcctattaacgcgcctataaaaacctttatgttgcctaaacaagatatagtaggtttggatctggaaaatctatatgccgtaactaagactgacggcattcctataactatcagagttacatcaaacgggttgtattgttattttacacatcttggttatattattagatatcctgttaagagaataatagattccgaagtagtagtctttggtgaggcagttaaggataagaactggactgtatatctcattaagctaatagagcccgtgaatgctatcagtgatagactagaagaaagtaagtatgttgaatctaaactagtggatatttgtgatcggatagtattcaagtcaaagaaatacgaaggtccgtttactacaactagtgaagtcgtcgatatgttatctacatatttaccaaagcaaccagaaggtgttattctgttctattcaaagggacctaaatctaacattgattttaaaattaaaaaggaaaatactatagaccaaactgcaaatgtagtatttaggtacatgtccagtgaaccaattatctttggagaatcgtctatctttgtagagtataagaaatttagcaacgataaaggctttcctaaagaatatggttctggtaagattgtgttatataacggcgttaattatctaaataatatctattgtttggaatatattaatacacataatgaagtgggtattaagtccgtggttgtacctattaagtttatagcagaattcttagttaatggagaaatacttaaacctagaattgataaaaccatgaaatatattaactcagaagattattatggaaatcaacataatatcatagtcgaacatttaagagatcaaagcatcaaaataggagatatctttaacgaggataaactatcggatgtgggacatcaatacgccaataatgataaatttagattaaatccagaagttagttattttacgaataaacgaactagaggaccgttgggaattttatcaaactacgtcaagactcttcttatttctatgtattgttccaaaacatttttagacgattccaacaaacgaaaggtattggcgattgattttggaaacggtgctgacctggaaaaatacttttatggagagattgcgttattggtagcgacggatccggatgctgatgctatagctagaggaaatgaaagatacaacaaattaaactctggaattaaaaccaagtactacaaatttgactacattcaggaaactattcgatccgatacatttgtctctagtgtcagagaagtattctattttggaaagtttaatatcatcgactggcagtttgctatccattattcttttcatccgagacattatgctaccgtcatgaataacttatccgaactaactgcttctggaggcaaggtattaatcactaccatggacggagacaaattatcaaaattaacagataaaaagacttttataattcataagaatttacctagtagcgaaaactatatgtctgtagaaaaaatagctgatgatagaatagtggtatataatccatcaacaatgtctactccaatgactgaatacattatcaaaaagaacgatatagtcagagtgtttaacgaatacggatttgttcttgtagataacgttgatttcgctacaattatagaacgaagtaaaaagtttattaatggcgcatctacaatggaagatagaccgtctacaaaaaactttttcgaactaaatagaggagccattaaatgtgaaggtttagatgtcgaagacttacttagttactatgttgtttatgtcttttctaagcggtaaataataatatggtatgggttctgatatccccgttctaaatgcattaaataattccaatagagcgatttttgttcctataggaccttccaactgtggatactctgtattgttaatagatatattaatacttttgtcgggtaacagaggttctacgtcttctaaaaataaaagtttgataacatctggcctgttcataaataaaaacttggcgattctatatatactcttattatcaaatctagccattgtcttatagatgtgagctactgtaggtgtaccatttgattttctttctaatactatatatttctctcgaagaagttcttgcacatcatctgggaataaaatactactgttgagtaaatcagttattttttttatatcgatattgatggacatttttatagttaaggataataagtatcccaaagtcgataacgacgataacgaagtatttatacttttaggaaatcacaatgactttatcagattaaaattaacaaaattaaaggagcatgtatttttttctgaatatattgtgactccagatacatatggatctttatgcgtcgaattaaatgggtctagttttcagcacggcggtagatatatagaggtggaggaatttatagatgctggaagacaagttagatggtgttctacatccaatcatatatctaaagatatacccgaagatatgcacactgataaatttgtcatttatgatatttatacgtttgattcgttcaagaataaacgattggtattcgtacaggtgcctccatcattaggagatgatagctatttgactaatccgttattgtctccgtattatcgtaattcagtagccagacaaatggtcaatgatatgatttttaatcaagattcatttttaaaatatttattagaacatctgattagaagccactatagagtttctaaacatataacaatagttagatacaaggataccgaagaattaaatctaacgagaatatgttataatagagataagtttaaggcgtttgtattcgcttggtttaacggcgtttcggaaaatgaaaaggtactagatacgtataaaaaggtatctaatttgatataatgaattcagtgactgtatcacacgcgccatatactattacttatcacgatgattgggaaccagtaatgagtcaattggtagagttttataacgaagtagccagttggctgctacgagacgagacgtcgcctattcctgataagttctttatacagttgaaacaaccgcttagaaataaacgagtatgtgtgtgcggtatagatccgtatccgaaagatggaactggtgtaccgttcgaatcaccaaattttacaaaaaaatcaattaaggagatagcttcatctatatctagattaaccggagtaattgattataaaggttataaccttaatataatagacggggttataccctggaattattacttaagttgtaaattaggagaaacaaaaagtcacgcgatctactgggataagatttccaagttactgctgcagcatataactaaacacgttagtgttctttattgtttgggtaaaacagatttctcgaatatacgggccaagttagaatccccggtaactaccatagtcggatatcatccagcggctagggaccgccaattcgagaaagatagatcatttgaaattatcaacgttttactggaattagacaacaaggcacctataaattgggctcaagggtttatttattaatgctttagtgaaattttaacttgtgttctaaatggatgcaactattagaggtaatgatgttatttttgtccttaagactataggtgtcccatcagcatgtagacaaaatgaagatccaagattcgtagaagcatttaaatgcgacgagttaaaaagatatattgagaataatccagaatgtacactattcgaaagtcttagggatgaggaagcatactctatagtcagaattttcatggatgtagatttagacgcgtgtctagacgaaatagattatttaacggctattcaagattttattatcgaggtgtcaaactgtgtagctagattcgcgtttacagaatgcggtgccattcatgaaaatgtaataaaatccatgagatctaatttttcattgactaagtctacaaatagagataaaacaagttttcatattatctttttagacacgtataccactatggatacattgatagctatgaaacgaacactattagaattaagtagatcatctgaaaatccactaacaagatcgatagacactgccgtatataggagaaaaacaactcttcgggttgtaggtactaggaaaaatccaaattgcgacactattcatgtaatgcaaccaccgcatgataatatagaagattacctattcacttacgtggatatgaacaacaatagttattacttttctctacaacgacgattggaggatttagttcctgataagttatgggaaccagggtttatttcattcgaagacgctataaaaagagtttcaaaaatattcattaattctataataaactttaatgatctcgatgaaaataattttacaacggtaccactggtcatagattacgtaacaccttgtgcattatgtaaaaaacgatcgcataaacatccgcatcaactatcgttggaaaatggtgctattagaatttacaaaactggtaatccacatagttgtaaagttaaaattgttccgttggatggtaataaactgtttaatattgcacaaagaattttagacactaactctgttttattaaccgaacgaggtgaccatatagtttggattaataattcatggaaatttaacagcgaagaacccttgataacaaaactaattttgtcaataagacatcaactacctaaggaatattcaagcgaattactctgtccaagaaaacgaaagactgtagaagctaacatacgagacatgttagtagattcagtggaaaccgatacctatccggataaacttccgtttaaaaatggtgtattggacctggtagacggaatgttttactctggagataatgctaaaaaatatacgtgtactgtatcaaccggatttaaatttgacgatacaaagttcgtcgaagacagtccagaaatggaagagttaatgaatatcattaacgatatccaaccattaacggatgaaaataagaaaaatagagagttgtacgaaaaaactttatctagttgtttatgcggtgctaccaaaggatgtttaacattcttttttggagaaactgcaactggaaagtcgacaaccaaacgtttgttaaagtctgctatcggtgacctgtttgttgagacgggtcaaacaattttaacagatgtattggataaaggacctaatccatttatcgctaacatgcatttgaaaagatctgtattctgtagcgaactacctgattttgcctgtagtggatcaaagaaaattagatctgacaatattaaaaagttgacagaaccttgtgtcattggaagaccgtgtttctccaataaaattaataatagaaaccatgcgacaatcattatcgatactaattacaaacctgtttttgataggatagataacgcattaatgagaagaattgccgtcgtgcgattcagaacacacttttctcaaccttctggtagagaggctgctgaaaataatgacgcgtacgataaagtcaaactattagacgaggggttagatggtaaaatacaaaataatagatatagattcgcatttctatacttgttggtgaaatggtacagaaaatatcatgttcctattatgaaactatatcctacaccggaagagattccggactttgcattctatctcaaaataggtactctgttggtatctagctctgtaaagcatattccattaatgacggacctctccaaaaagggatatatattgtacgataatgtggtcactcttccgttgactactttccaacagaaaatatccaagtattttaattctagactatttggacacgatatagagagcttcatcaatagacataagaaatttgccaatgttagtgatgaatatctgcaatatatattcatagaggatatttcatctccgtaaatatatgctcatatatttatagaagatatcacatatctaaatgaataccggaatcatagatttatttgataatcatgttgatagtataccaactatattacctcatcagttagctactctagattatctagttagaactatcatagatgagaacagaagcgtgttattgttccatattatgggatcaggtaaaacaataatcgctttgttgttcgccttggtagcttccagatttaaaaaggtttacattctagtgccgaacatcaacatcttaaaaattttcaattataatatgggtgtagctatgaacttgtttaatgacaaattcatagctgagaatatctttattcattccacaacaagtttttattctcttaattataacgataacgtcattaattataacggattatctcgctacaataactctatttttatcgttgatgaggcacataatatctttgggaataatactggagaacttatgaccgtgataaaaaataaaaacaagattccttttttactattgtctggatctcccattactaacacacctaatactctgggtcatattatagatttaatgtccgaagagacgatagattttggtgaaattattagtcgtggtaagaaagtaattcagacacttcttaacgaacgcggtgtgaatgtacttaaggatttgcttaaaggaagaatatcatattacgaaatgcctgataaagatctaccaacgataagatatcacggacgtaagtttctagatactagagtagtatattgtcacatgtctaaacttcaagagagagattatatgattactagacgacagctatgttatcatgaaatgtttgataaaaatatgtataacgtgtcaatggcagtattgggacaacttaatctgatgaataatttagatactttatttcaggaacaggataaggaattgtacccaaatctgaaaataaataatggcgtgttatacggagaagaattggtaacgttaaacattagttccaaatttaaatactttatcaatcggatacagacactcaacggaaaacattttatatacttttctaattctacatatggcggattggtaattaaatatatcatgctcagtaatggatattctgaatataatggttctcagggaactaatccacatatgataaacggcaaaccaaaaacatttgctatcgttactagtaaaatgaaatcgtctttagaggatctattagatgtgtataattctcctgaaaacgatgatggcagtcaattgatgtttttgttttcgtcaaacattatgtccgaatcctatactctgaaagaggtaaggcatatttggtttatgactatcccagatactttttctcaatacaaccaaattcttggacgatctattagaaaattctcttacgccgatatttctgaaccagttaatgtatatcttttagccgccgtatattccgatttcaatgacgaagtgacgtcattaaacgattacacacaggatgaattaattaatgttttaccatttgacatcaaaaagctgttatatctaaaatttaagacgaaagaaacgaatagaatatactctattcttcaagagatgtctgaaacgtattctcttccaccacatccatcaattgtaaaagttttattgggagaattggtcagacaatttttttataataattctcgtattaagtataacgactccaagttacttaaaatggttacatcagttataaaaaataaagaagacgctaggaattacatagatgatattgtaaacggtcacttctttgtatcgaataaagtatttgataaatctcttttatacaaatacgaaaacgatattattacagtaccgtttagactttcctacgaaccatttgtttggggagttaactttcgtaaagaatataacgtggtatcttctccataaaactgatgagatatataaagaaataaatgtcgagctttgttaccaatggataccttccagttacattggaacctcatgagctgacgttagacataaaaactaatattaggaatgccgtatataagacgtatctccatagagaaattagtggtaaaatggccaagaaaatagaaattcgtgaagacgtggaattacctctcggcgaaatagttaataattctgtagttataaacgttccgtgtgtaataacctacgcgtattatcacgttggggatatagtcagaggaacattaaacatcgaagatgaatcaaatgtaactattcaatgtggagatttaatctgtaaactaagtagagattcgggtactgtatcatttagcgattcaaagtactgcttttttcgaaatggtaatgcgtatgacaatggcagcgaagtcactgccgttctaatggaggctcaacaaggtatcgaatctagttttgtttttctcgcgaatatcgtcgactcataaaaaagagaatagcggtaagtataaacacgaatactatggcaataattgcgaatgttttattcccttcgatatatttttgataatatgaaaaacatgtctctctcaaatcggacaaccatctcataaaatagttctcgcgcgctggagaggtagttgctgctcgtataatctccccagaataatatacttctgtgtcatcgttcaatttatacggatttctatagttctctgttatataatgcggtttgccctcatgattagacaacgacaatagtgttctgaatttagatagttgatcagaatgaatgtttattggcgttggaaaaattatccatacagcgtctgcagagtggttgatagttgttcctagatatgtaaaataatccaacttactaggcagcaaattgtctagataaaatactgaatcaaacggtgcagacgtattggcggatctaatggaatccaattgattaactatcttttgaaaatatacatttttatgatccaatacttgtaagaatatagaaataatgataagtccatcatcgtgtttttttgcctcttcataagaactatattttttcttattccaatgaacaagattaatctctccagagtatttgtacacatctatcaagtgattggatccataatcgtcttcctttccccaatatatatgtagtgatgataacacatattcattggggagaaaccctccacttatatatcctcctttaaaattaatccttactagttttccagtgttctggatagtggttggtttcgactcattataatgtatgtctaacggcttcaatcgcgcgttagaaattgcttttttagtttctatattaataggagatagttgttgcggcatagtaaaaatgaaatgataactgtttaaaaatagctcttagtatgggaattacaatggatgaggaagtgatatttgaaactcctagagaattaatatctattaaacgaataaaagatattccaagatcaaaagacacgcatgtgtttgctgcgtgtataacaagtgacggatatccgttaataggagctagaagaacttcattcgcgttccaggcgatattatctcaacaaaattcagattctatctttagagtatccactaaactattacggtttatgtactacaatgaactaagagaaatctttagacggttgagaaaaggttctatcaacaatatcgatcctcactttgaagagttaatattattgggtggtaaactagataaaaaggaatctattaaagattgtttaagaagagaattaaaagaggaaagtgatgaacgtataacagtaaaagaatttggaaatgtaattctaaaacttacaacacgggataaattatttaataaagtatatataagttattgcatggcgtgttttattaatcaatcgttggaggatttatcgcatactagtatttacaatgtagaaattagaaagattaaatcattaaatgattgtattaacgacgataaatacgaatatctgtcttatatttataatatgctagttaatagtaaatgaacttttacagatctagtataattagtcagattattaagtataatagacgactagctaagtctattatttgcaaggatgactctcaaattattacactcacggcattcgttaaccaatgcctatggtgtcataaacgagtatccgtgtccgctattttattaactactgataacaaaatattagtatgtaacagacgagatagttttctctattctgaaataattagaactagaaacatgtttagaaagaaacgattatttctgaattattccaattatttgtccaaacaggaaagaagtatactatcgtcatttttttctctatatccagctactgctgataatgatagaatagacgctatttatccgggtggcatacccaaaaggggtgagaatgttccagagtgtttatccagggaaattaaagaagaagttaatatagacaattcttttgtattcatagacactcggttttttattcatggcatcatagaagataccattattaataaattttttgaggtaatcttctttgtcggaagaatatctctaacgagtgatcaaatcattgatacatttaaaagtaatcatgaaatcaaggatctaatatttttagatccgaattcaggtaatggactacaatacgaaattgcaaaatatgctctagatactgcaaaacttaaatgttacggccatagaggatgttattacgaatcattaaaaaaattaactgaggatgattgattagaaaatataaattaatttaccatcgtgtatttttataacgggattgtccggcatatcatgtagatagttaccgtctacatcgtatactcgaccatctacgcctttaaatcctctatttattgacattaatctattagaattggaataccaaatattagtaccctcaattagtttattggtaatattttttttagacgatagatcgatggctcttgaaaccaaggttttccaaccggactcattgtcgatcggtgagaagtctttttcattagcatgaatccattctaatgatgtatgtttaaacactctaaacaattggacaaattcttttgatttgctttgaatgatttcaaataggtcttcgtctacagtaggcataccattagataatctagccattataaagtgcacgtttacatatctacgttctggaggagtaagaacgtgactattgagacgaatggctcttcctactatctgacgaagagacgcctcgttccatgtcatatctaaaatgaagatatcattaattgagaaaaaactaataccctcgcctccactagaagagaatacgcatgttttaatgcattctccgttagtgtttgattcttggttaaactcagccaccgccttgattctagtatcttttgttctagatgagaactctatattagagataccaaagactttgaaatatagtaataagatttctattcctgactgattaacaaatggttcaaagactagacatttaccatgggatgctaatattcccaaacatacatctataaatttgacgcttttctcttttaattcagtaaatagagagatatcagccgcactagcatcccctttcaatagttctccctttttaaaggtatctaatgcggatttagaaaactctctatctcttaatgaatttttaaaatcattatatagtgttgctatctcttgcgcgtattcgcccggatcacgattttgtctttcaggaaagctatcgaacgtaaacgtagtagccatacgtctcagaattctaaatgatgatatacctgtttttatttcagcgagtttagccttttgataaatttcttcttgctttttcgacatattaacgtatcgcattaatactgttttcttagcgaatgatgcagacccttctacgtcatcaaaaatagaaaactcgttattaactatatacgaacatagtcctcctagtttggagactaattctttttcatcgactagacgtttattctcaaatagtgattggtgttgtaaggatcctggtcgtagtaagttaaccaacatggtgaattcttgcacactattgacgataggtgtagccgataaacaaatcatcttatggttttttaatgcgatggtcttggataaaaaattatatactgaacgagtaggacggatcttaccatcttctttgattaatgatttagaaatgaagttatgacattcatcaataatgacgcatattctactcttggaattaatagttttgatattagtaaaaaatttatttctaaaattttgatcatcgtaattaataaaaatacaatccttcgttatctctggagcgtatctgagtatagtgttcatccaaggatcttctatcaaagcctttttcaccaataagataatagcccaattcgtataaatatccttaagatgtttgagaatatatacagtagtcattgttttaccgacacccgtttcatggaacaataaaagagaatgcatactgtctaatcctaagaaaactcttgctacaaaatgttgataatccttgaggcgtactacgtctgttcccatcatttcaacaggcatattagtagttctgcgcaatgcataatcgatataggccgcgtgtgatttactcattagggataacagggtaat

SEQ ID NO: 59 - DNA, 24671 bp, Vaccinia virus
tagggataacagggtaatttagaaaatataaattaatttaccatcgtgtatttttataacgggattgtccggcatatcatgtagatagttaccgtctacatcgtatactcgaccatctacgcctttaaatcctctatttattgacattaatctattagaattggaataccaaatattagtaccctcaattagtttattggtaatattttttttagacgatagatcgatggctcttgaaaccaaggttttccaaccggactcattgtcgatcggtgagaagtctttttcattagcatgaatccattctaatgatgtatgtttaaacactctaaacaattggacaaattcttttgatttgctttgaatgatttcaaataggtcttcgtctacagtaggcataccattagataatctagccattataaagtgcacgtttacatatctacgttctggaggagtaagaacgtgactattgagacgaatggctcttcctactatctgacgaagagacgcctcgttccatgtcatatctaaaatgaagatatcattaattgagaaaaaactaataccctcgcctccactagaagagaatacgcatgttttaatgcattctccgttagtgtttgattcttggttaaactcagccaccgccttgattctagtatcttttgttctagatgagaactctatattagagataccaaagactttgaaatatagtaataagatttctattcctgactgattaacaaatggttcaaagactagacatttaccatgggatgctaatattcccaaacatacatctataaatttgacgcttttctcttttaattcagtaaatagagagatatcagccgcactagcatcccctttcaatagttctccctttttaaaggtatctaatgcggatttagaaaactctctatctcttaatgaatttttaaaatcattatatagtgttgctatctcttgcgcgtattcgcccggatcacgattttgtctttcaggaaagctatcgaacgtaaacgtagtagccatacgtctcagaattctaaatgatgatatacctgtttttatttcagcgagtttagccttttgataaatttcttcttgctttttcgacatattaacgtatcgcattaatactgttttcttagcgaatgatgcagacccttctacgtcatcaaaaatagaaaactcgttattaactatatacgaacatagtcctcctagtttggagactaattctttttcatcgactagacgtttattctcaaatagtgattggtgttgtaaggatcctggtcgtagtaagttaaccaacatggtgaattcttgcacactattgacgataggtgtagccgataaacaaatcatcttatggttttttaatgcgatggtcttggataaaaaattatatactgaacgagtaggacggatcttaccatcttctttgattaatgatttagaaatgaagttatgacattcatcaataatgacgcatattctactcttggaattaatagttttgatattagtaaaaaatttatttctaaaattttgatcatcgtaattaataaaaatacaatccttcgttatctctggagcgtatctgagtatagtgttcatccaaggatcttctatcaaagcctttttcaccaataagataatagcccaattcgtataaatatccttaagatgtttgagaatatatacagtagtcattgttttaccgacacccgtttcatggaacaataaaagagaatgcatactgtctaatcctaagaaaactcttgctacaaaatgttgataatccttgaggcgtactacgtctgttcccatcatttcaacaggcatattagtagttctgcgcaatgcataatcgatataggccgcgtgtgatttactcatttatgagtgataagtaataactatgttttaaaaatcacagcagtagtttaactagtcttctctgatgtttgttttcgatactttttgaatcagaagtcatactagaataaagcaacgagtgaacgtaatagagagcttcgtatactctattcgaaaactctaagaacttattaatgaattccgtatccactggattgtttaaaatactaaattgaacactgttcacatccttccaagaagaagacttagtgacggacttaacatgagacataaataaatccaaattttttttacaaacatcactagccaccataatggcgctatctttcaaccagctatcgcttacgcattttagcagtctaacatttttaaagagactacaatatattctcatagtatcgattacacctctaccgaataaagttggaagtttaataatacaatatttttcgtttacaaaatcaaataatggtcgaaacacgtcgaaggttaacatcttataatcgctaatgtatagattgttttcagtgagatgattattagatttaatagcatctcgttcacgtttgaacagtttattgcgtgcgctgaggtcggcaactacggcgtccgctttagtactcctcccataatactttacgctattaatctttaaaatttcatagactttatctagatcgctttctggtaacatgatatcatgtgtaaaaagttttaacatgtcggtcggcattctatttagatcattaactctagaaatctgaagaaagtaattagctccgtattccagactaggtaatgggcttttacctagagacagattaagttctggcaatgtttcataaaatggaagaaggacatgcgttccctcccggatattttttacaatttcatccatttacaactctatagtttgttttcattattattagttattatctcccataatcttggtaatacttaccccttgatcgtaagataccttatacaggtcattacatacaactaccaattgtttttgtacataatagattggatggttgacatccatggtggaataaactactcgaacagatagtttatctttccccctagatacattagccgtaatagttgtcggcctaaagaatatctttggtgtaaagttaaaagttagggttcttgttccattattgctttttgtcagtagttcattataaattctcgagatgggtccgttctctgaatatagaacatcatttccaaatctaacttctagtctagaaataatatcggtcttattcttaaaatctattcccttgatgaagggatcgttaatgaacaaatccttggcctttgattcggctgatctattatctccgttatagacgttacgttgactagtccaaagacttacaggaatagatgtatcgatgatgttgatactatgtgatatgtgagcaaagattgttctcttagtggcatcactatatgttccagtaatggcggaaaactttttagaaatgttatatataaaagaattttttcgtgttccaaacattagcagattagtatgaagataaacactcatattatcaggaacattatcaatttttacatacacatcagcatcttgaatagaaacgataccatcttctggaacctcaacaatctcggcagactccggataaccagtcggtgggccatcactaacaataactagatcatccaacaatctactcacatatgcatctatataatctttttcatcttgtgagtaccctggatacgaaataaatttattatccgtatttccataataaggtttagtataaacagagagcgatgttgccgcatgaacttcagttacagtcgccgttggttggtttatttgacctattactctcctaggtttctctataaacgatggtttaatttgtacattcttaaccatatatccaataaagctcaattcaggaacataaacaaattctttgttgaacgtttcaaagtcgaacgaagagtcacgaataacgatatcggatactggattgaaggttaccgttacggtaatttttgaatcggatagtttaagactgctgaatgtatcttccacatcaaacggagttttaatataaacgtatactgtagatggttctttaatagtgtcattaggagttaggccaatagaaatatcattaagttcactagaatatccagagtgtttcaaagcaattgtattattgatacaattattatataattcttcgccctcaatttcccaaataacaccgttacacgaagacaccgatacgtaattaatacatttatatccaacatatggtacgtaaccgaatcttcccatacctttaacttctggaagttccaaactcagaaccaaatgattaagcgcagtaatatactgatccctaatttcgaagctagcgatagcctgattgtctggaccatcgtttgtcataactccggatagagaaatatattgcggcatatataaagttggaatttgactatcgactgcgaagacattagaccgtttaatagagtcatccccaccgatcaaagaattaatgatagtattattcattttctatttaaaatggaaaaagcttacaataaactccgtagagaaatatctataatttgtgagttttccttaaagtaacagcttccgtaaacgccgtctttatctcttagtaagtttattgtatttataaccttttccttatcttcatagaatactaaaggcaacaaagaaatttttggttcttctctaagagctacgtgagacttaaccatagacgccaacgaatccctacatattttagaacagaaatacccaacttcaccacccttgaatgtctcaatactaataggtttaaaaaccaaatcttgattacaaaaccaacacttatcaattacactatttgtcttaatagacacatctgccatagatttataatactttggtagtatacaagcgagtgcttcttctttagcgggcttaaagactgctttaggtgctgaaataaccacatctggaaggcttactcgcttagccatttaattacggaactatttttttatacttctaatgagcaagtagaaaacctctcatctacaaaaacatactcgtgtccataatcctctaccatagttacacgttttttagatctcatatgtgctaaaaagttttcccatactaattggttactattatttttcgtataatttttaacagtttgaggttttagatttttagttacagaagtgatatcgaatattttatccaaaaagaatgaataattaattgtcttagaaggagtgttttcttggcaaaagaataccaagtgcttaaatatttctactacttcattaatcttttctgtactcagattcagtttctcatcttttacttgattgattatttcaaagactaacttataatcctttttatttattctctcgttagccttaagaaaactagatacaaaatttgcatctacatcatccgtggatatttgatttttttccatgatatccaagagttccgagataatttctccagaacattgatgagacaataatctccgcaatacatttctcaaatgaataagtttattagacacgtggaagtttgactttttttgtacctttgtacatttttgaaataccgactcgcaaaaaatacaatattcatatccttgttcagatactataccgttgtgtctacaaccgctacataatcgtagattcatgttaacactctacgtatctcgtcgtccaatattttatataaaaacattttatttctagacgttgccagaaaatcctgtaatatttttagttttttgggctgtgaataaagtatcgccctaatatggttaccgtcctccgccaatatagtagttaaattatccgcacatgcagaagaacaccgcttaggcggattcagtacaatgttatatttttcgtaccaactcatttaaatatcataatctaaaatagttctgtaatatgtctagcgctaatatattgatcataatcctgtgcataaattaagatacaacaatgtctcgaaatcatcgacatggcttcttccatagttagaagatcgtcgtcaaagttagcaacgtgattcatcaacatttgctgttttgaggcagcaaatactgaaccgtcgccattcaaccattcataaaaaccatcgtctgaatccattgataatttcttgtactggtttttgagagctcgcatcaatctagcatttctagctcccggattgaaaacagaaagaggatcgtacatccagggtccattttctgtaaatagaatcgtataatgtcccttcaagaagatatcagacgatccacaatcaaagaattgatctccgagtttgtaacaaactgcggactttaacctatacatgataccgtttagcatgatttctggtgatacgtcaatcggagtatcatctattagagatctaaagccggtgtaacattctccaccaaacatattcttattctgacgtcgttctacataaaacatcattgctccattaacgataacaggggaatgaacagcactacccatcacattagttcccaatggatcaatgtgtgtaactccagaacatcttccatagcctatgttaggaggagcgaacaccactcttccactattgccatcgaatgccatagaataaatatccttggaattgatagaaatcggactgtcggatgttgtgatcatcttcataggattaacaactatgtatggtgccgcctgaagtttcatatcgtaactgatgccgtttataggtctagccacagaaaccaacgtaggtctaaatccaactatagacaaaatagaagccaatatctgttcctcatctgtcataacttgagagcatccagtatgaataatcttcattagatggggatctaccgcatcatcatcgttacaataaaaaattcccattctaatgttcataattgcttttctaatcatggtatgcatgtttgctctctgaatctctgtggaaattagatctgatacacctgtaatcactatcggattatcctccgtaagacgattaaccaacaacatataattataagactttacttttctaaattcataaagttgctggattaggctataggtgtctccatgtacatacgcgttctcgagcgcaggaagtttaataccgaatagtgccatcagaataggatgaatatagtaattagtttctggttttctataaataaaagacaaatcttgtgaactagacatatcggtaaaatgcatggattggaatcgtgtagtcgacagaagaatatgatgattagatggagagtatattttatctaactctttgagttggtcaccgattctaggactagctcgagaatgaataagtactaaaggatgagtacatttcacagaaacactagcattgttcaatgtgctctttacatgggtaaggagttgaaatagctcgtttctatttgttctgacaatatttagtttattcataatgttaagcatatcctgaatagtaaagttagatgtgtcatacttgttagtagttagatatttagcaattgcattcccatcatttctcaatctcgtactccaatcatgcgtggatgctacttcgtcgatggaaaccatacaatcctttttgataggctgttgagattgattatttcctgcacgtttaggtttggtacgttgatttctagcccctgcggatataaagtcatcgtctacaattttggataatgaattgcatacactacaagacaaagatttatcagaagtgtgaatatgatcttcatctaccaaagaaagagtttgattagtataactagattttagtcctgcgttagatgttaaaaaaacatcgctattgaccacggcttccattatttatattcgtagtttttactcgaaagcgtgattttaatatccaatcttattacttttggaatcgttcaaaacctttgactaattgtagaatttgatctattgccctacgcgtatactcccttgcatcatatacgttcgtcaccagatcgtttgtttcggcctgaagttggtgcatatctctttcaacattcgacatgagatccttaagggccatatcgtctagattttgttgagatgttgctcctggattttgttgtgctgttgtacatactgtaccaccagtaggtgtaggagtacatacagtggccacaataggaggttgaggaggtgtaaccgttggagtagtacaagaaatatttccatccgattgttgtgtacatgtagttgttggtaacgtctgagaaggttgggtagatggcggtgtcgtcgtcttttgatctttattaaatttagagataatatcctgaacagcattgctcggcgtcaacgctggaaggagtgaactcgccggcgcatcagtatctgcagacagccaatcaaaaagattagacatatcagatgatgtattagtttgttgtcgtggttttggtgtaggagcagtactactaggtagaagaataggagccgatgtaggtgtcggaaccggaaccggctgtggagttatatgaatagttggttgtagcggttggataggctgtctgctggcggccatcatattatctctagctagttgttctcgcaactgtctttgataatacgactcttgagactttagtcctatttcaatcgcttcatcctttttcgtatccggatccttttcttcagaataatagattgacgactttggtgtagaggattctgccagcccctgtgagaacttgttaaagaagtccatttaaggctttaaaattgaattgcgattataagattaaatggcagacacagacgatattatcgactatgaatccgatgatctcactgaatacgaggatgatgaagaagaggaagaagatggagagtcactagaaactagtgatatagatcccaaatcttcttataagattgtagaatcagcatccactcatatagaagatgcgcattccaatcttaaacatatagggaatcatatatctgctcttaaacgacgctatactagacgtataagtctatttgaaatagcgggtataatagcagaaagctataacttgcttcaacgaggaagattacctctagtttcagaattttctgacgaaacgatgaagcaaaatatgctacatgtaattatacaagagatagaggagggttcttgtcctatagtcatcgaaaagaacggagaattgttgtcggtaaacgattttgacaaagatggtctaaaattccatctagactatattatcaaaatttggaaacttcaaaaacgatattagaatttatacgaatatcgttctctaaatgtcacaatcaagtctcgcatgttcagcaatttattgtcgtactttatatcgtgttcattaacgatatcttgcaaaatagtaatgattctatcttccttcgatagatattcttcagagattattgtcttatattctttcttgttatcagatatgaatttgataagactttgaacattattgatacccgtctgtttaattttttctacagatattttagttttggcagattctatcgtatctgtcaatagacatccaacatcgacattcgacgtcaattgtctataaatcaacgtataaattttagaaataacattagcgaattgttgtgcattgatgtcgttattctgaaacagtatgattttaggtagcattttcttaacaaagagaacgtatttattgttactcagttgaacagatgatatatccagattactaacgcatctgattccgtataccaaactttcagaagaaatggtgtacaattgtttgtattcattcaatgtctccttttcagaaattagtttagagtcgaatactgcaataattttcaagagatagttttcatcagataagattttatttagtgtagatatgataaaactattgttttgttggagaacttgatacgccgcgttctctgtagtcgacgctctcaaatgggaaacgatctccattatttttttggaatcggatacaatatcttcggtatcttgacgcaatctagtatacatagagttaagagaaattagagtttgtacattgagcaacatgtctctaaatgtggctacaaacttttcctttttcacatcatctagtttattatataccgatttcacaacggcaccagatttaaggaaccagaatgaaaaactctgataactacaatatttcatcatagttacgattttatcatcttctatagttggtgtaatagcgcatacctttttctccaagactggaaccaacgtcataaaaatgtttaaatcaaaatccatatcaacatctgatgcgctaagaccagtctcgcgttcaagattatctttactaatggtgacgaactcatcgtatagaactctaagtttgtccattatttatttacagatttagttgtttaatttatttgtgctcttccagagttgggatagtatttttctaacgtcggtattatattattaggatctacgttcatatgtatcataatattaatcatccacgttttgataaatctatctttagcttctgaaataacgtatttaaacaaaggagaaaaatatttagctacggcatcagacgcaataacattttttgtaaatgtaacgtatttagacgacagatcttcgttaaaaagttttccatctatgtagaatccatcggttgttaacaccattcccgcgtcagattgaataggagtttgaatagtttgttttggaaatagatccttcaataacttatagttgggtgggaaaaaatcgattttatcactagactctttcttttttactatcattacctcatgaactatttcttgaatgagtatatgtattttctttcctatatcggacgcgttcattggaaaatataccatgtcgttaactataagaatatttttatcctcgtttacaaactgaataatatcagatgtagttcgtaaacgaactatatcatcaccagcacaacatctaactatatgatatccactagtttcctttagtcgtttattatcttgttccatattagcagtcattccatcatttaagaaggcgtcaaagataatagggagaaatgacattttggattctgttacaactttaccaaaattaaggatatacggacttactatctttttttcaacgtcaatttgatgaacacacgatgaaaatgtacttcgatgagattgatcatgtagaaaacaacaagggatacaatatttccgcatatcatgaaatatattaagaaatcccaccttattatatttccccaaaggatccatgcacgtaaacattatgccgttatcattaataaagacttctttctcatcggatctgtaaaagttgttactgatttttttcattccaggatctagataattaataatgatgggttttctattcttattctttgtattttggcatatcctagaccagtaaacagtttccactttggtaaaatcagcagacttttgaacgctattaaacatggcattaatggcaataactaaaaatgtaaaatatttttctatgttaggaatatggtttttcactttaatagatatatggtttttggccaaaatgatagatatttttttatccgaggatagtaaaatattattagtcgccgtctctataaaaatgaagctagtctcgatatccaattttattctagaattgataggagtcgccaaatgtaccttatacgttatatctcccttgatgcgttccatttgtgtatctatatcggacacaagatctgtaaatagttttacgttattaatcatcacggtatcgccgtcgctagataacgctaatgtaccatccaagtcccaaatggagagatttaactgttcatcgtttagaataaaatgattaccggtcatattaataaagtgttcatcgtatctagataacaacgacttataattaatgtccaagtcttgaactcgctgaatgatcttttttaacccagttagttttagattggtacgaaatatattgttaaactttgattctacagtaatgtccaaatctagttgtggaaatacttccatcaacattgtttcaaacttgataatattattatctacatcttcgtacgatccaaattccggaatagatgtatcgcacgctctagccacccagataaccaaaaagtcacacgctccaggatatacattgtataaaaagctatcgttttttagtagtgtttttttctgagtatatacgaagggattaaaaatagtattatcaacgtaactatattccaaattattcttatgagaatagataataatatcgtccttaatatctaacaaatttcctaaatatccctttaattgagtcattcgaagcgtcaatagaatatgtctcttaactatttccggctgttgtatatttaaatgacttcgtaaaaaataatatatgggcgacttctcatctatgtaatcatatggagtgagatatagggctcgttctacctcctgccccttacccacctgtaataccaattgcggacttactatatatcgcatatttatatcgtggggtaaagtgaaaatctactaccgatgatgtaagtcttacaatgttcgaaccagtaccagatcttaatttggaggcctccgtagaactaggggaggtaaatatagatcaaacaacacctatgataaaggaaaatagcggttttatatcccgtagtagacgtctattcgcccatagatctaaggatgatgagagaaaactagcactacgattctttttacaaagactttattttttagatcatagagagattcattatttgttcagatgcgttgacgctgtaaaagacgtcactattaccaaaaaaaataacattatcgtggcgccttatatagcacttttaactatcgcatcaaaaggatgcaaacttacagaaacaatgattgaagcattctttccagaactatataatgaacatagtaagaaatttaaattcaactctcaagtatccatcatccaagaaaaactcggataccagtttggaaactatcacgtttatgattttgaaccgtattactctacagtagctctggctattcgagatgaacattcatctggcatttttaatatccgtcaagagagttatctggtaagttcattatctgaaataacatatagattttatctaattaatctaaaatctgatcttgttcaatggagtgctagtacgggcgctgtaattaatcaaatggtaaatactgtattgattacagtgtatgaaaagttacaactggtcatagaaaatgattcacaatttacatgttcattggctgtggaatcagaacttccaataaaattacttaaagatagaaatgaattatttacaaaattcatcaacgagttaaaaaagaccagttcattcaagataagcaaacgcgataaggatacgctactaaaatattttacttaggactggagttagaatttatagacgactcatttcgtttatcattgttactattattactattactatcattattagtgttggcattattagtattcttcttgtcatcttgttcagaaatatacagcaatgctatacctaatactaaatacattatcatgctcgcaatggctctaacaacgacgaaccaaaatgaatttggtcgtagcttttgttcacaaaaatacataaagaaatgtctacataaatctatggcgccattggctacttgaaatagcgccagtcctcctacagattttaatatagctgtataacatgacatttattcatcatcaaaagagacagagtcaccatctgtcatatttagattttttttcatgtgttcaaagtatcctctactcatttcattataatagtttatcatacttagaattttaggacggatcaatgagtaagacttgactagatcgtcagtagtaatttgtgcatcgtctattctgcatccgcttcgtcgaataatgtatagcatcgctttgagattctccatagctatcaagtctttatacaatgacatggaaatatctgtgaatactttatacttctccaacatcgatgccttaacatcatcgcctactttagcattgaaaatacgttctattgtgtagatggatgtaacaagatttttaaacaacaatgccattttacacgatgattgtctcaagtctccaatcgtttgtttagaacgattagctacagagtccaatgcttggctgactagcatattattatctttagaaattgtattcttcaatgaggcgtttatcatatctgtgatttcgttagtcatattacagtctgactgggttgtaatgttatccaacatatcacctatggatacggtacacgtaccagcatttgtaataatcctatctaagatgttgtatggcattgcgcagaaaatatcttctcctgtaatatctccactctcgataaatctactcagattattcttaaatgccttattctctggagaaaagatatcagtgtccatcatttcattaatagtatacgcagaaaagataccacgagtatcaattctatccaagatacttatcggttccgagtcacagataatggtttcctctccttcgggagatcctgcatagaaatatctaggacaatagtttctatactgtctgtaactctgataatctctaaagtcactaactgataccatgaaattgagaagatcaaacgctgaagtaattaatttttctgcctcgtttttactacaactagttttcatcaatgtagtgacgatgtattgtttagttactcttggtctaatactgatgatagagatattattacttcccataatggatcttctagtagtcaccttaaagcccattgatgcaaatagcagatagataaagtcttggtatgactcctttctaatatagtacggactacctttgtcacccaactttatacccacataagccataacaacctctttaatagccgtttcatgaggtttatcagccatgagcctgagtagttggaagaatctcatgaatcccgtctcagaaagtcctatatgcatgatagatttatctttcctgggaaactctcgtatagtcatagatgaaatactcttcaaagtttctgaaataagattagtaacagtcttacctccgactactctaggtaacaaacaaactctaataggtgttttctctgcggagataatatcagaaaggatagagcaataagtagtattattgtgattataaagaccgaatacataacaggtagaatttataaacatcatgtcctgaaggtttttagacttgtattcctcgtaatccataccgtcccaaaacatggatttggtaactttgatagccgtagatctttgttccttcgccaacaggttaaagaaattaataaagaatttgtggtttctacctatgtctacaaattgcacgtttggaagcgtaactgttacgttcactgcagcattttgaggatttcgagtatgaagtacgatgttattgtttactggtatatctggaaagaattctaccagtctaggaataagagattgatatcgcatagaaatacaaaagttcataatctcatcatcgaagagcattttgttaccattgtaataaatatccactctgtcatatgtataaatgaagtactgttcaaacatgatgagatgtttatatgttggcatagtagtgagatcgacgtttggtaatggcaatgtattaagattaactccataatgtctagcagcatctgcgatgttataagcgtcgtcaaagcggggtcgatcttgtgctgttatatattgtctaacacctataagattatcaaaatcttgtctgcttaatacaccgttaacaatttttgccttgaattcttttattggtgcattaataacatccttatagaggatgttaaacaaataagtattatcaaagttaagatctgggtatttcttttctgctagaacatccattgagtcggagccatctggtttaatataaccaccgataaatctagctctgtattctgtatccgtcaatctaatattaagaaggtgttgagtgaaaggtggaagatcgtaaaagctgtgagtattaataatagggttagtttccgaactaatgttaattggggtattaataatatctatatttccagcgttaagtgtaacattaaacagttttaattcacgtgacgtggtatcaattaaataattaatgcccaatttggatatagcagcctgaagctcatcttgtttagttacggatcctaatgagttattaagcaatatatcgaacggatgaacgaaggttgttttaagttggtcacatactttgtaatctagacatagatgcggaagaacggtagaaactatacgaaataaatattcagagtcctctaattgatcaagagtaactattgacttaataggcatcatttatttagtattaaatgacgaccgtaccagtgacggatatacaaaacgatttaattacagagttttcagaagataattatccatctaacaaaaattatgaaataactcttcgtcaaatgtctattctaactcacgttaacaacgtggtagatagagaacataatgccgccgtagtgtcatctccagaggaaatatcctcacaacttaatgaagatctatttccagatgatgattcaccggccactattatcgaacgagtacaacctcatactactattattgacgatactccacctcctacgtttcgtagagagttattgatatcggaacaacgtcaacaacgagaaaaaagatttaatattacagtatcgaaaaatgctgaagcaataatggaatctagatctatgataacttctatgccaacacaaacaccatccttgggagtagtttatgataaagataaaagaattcagatgttagaggatgaagtggttaatcttagaaatcaacgatctaatacaaaatcatctgataatttagataattttaccaaaatactatttggtaagactccgtacaaatcaacagaagttaataagcgtatagccatcgttaattatgcaaatttgaacggctctcccttatcagtcgaggacttggatgtttgttcagaggatgaaatagatagaatctataaaacgattaaacaatatcacgaaagtagaaaacgaaaaattatcgtcactaacgtgattattattgtcataaacattatcgagcaggcattgctaaaactcggatttgaagaaatcaaaggactgagtaccgatatcacttcagaaattatcgatgtggagatcggagatgactgcgatgctgtagcatctaaactaggaatcggtaacagtccggttcttaatattgtattgtttatactcaagatattcgttaaacgaattaaaattatttaatttaatacattcccatatccagacaacaatcgtctggattaatctgttcctgtcgtctcataccggacgacatattaatctttttattagtgggcatctttttagatggtttctttttcccagcattaactgattcgatacctagaagatcgtgattgatctctccgaccattccacgaacttctaattggccgtctctgacggtaccataaactattttaccagcattagtaacagcttggacaatctgaccatccatcgcattgtacgatgtagtagtaactgttgttctacgtttaggagcaccagaagtatttttggagcccttggatgttgatgtagaagaagacgaggattttgattttggtttacatgtaatacattttgaactctttgattttgtatcacatgcgccggcagtcacatctgtttgagaattaagattattgttgcctcctttgacggctgcatctccaccgatttgcgctagtagatttttaagctgtggtgtaatcttattaactgtttcgatataatcatcgtaactgcttctaacggctaaattttttttatccgccatttagaagctaaaaatatttttatttatgcagaagatttaactagattatacaatgaactaatatgatccttttccagattatttacaaacttggtatttcttggttctggaggaggcgaatttaaattcggacttggattcggattttgtgggttcttgatcttattatacagcgcatataggatggcgacggtaactgctacgcaaataccgatcaacaaaagaataccaatcatttattgacaataacttcactattgatcaagtatgcaatatatcatcttttcactaaataagtagtaataatgattcaacaatgtcgagatatatggacgataataacttagttcacggaaatatcgctatgattggtgtgaatgactccgctaactctgtggggcgcgcagtgctttccccacatagaataaattagcattccgactgtgataataataccaagtataaacgccataatactcaatactttccatgtacgagtgggactggtagacttactaaagtcaataaaggcgaagatacacgaaagaatcaaaagaatgattccagcgattagcacgccggaaaaataatttccaatcataagcatcatgtccatttaactaataaaaattttaaatcgccgaatgaacaaagtggaatataaaccatataaaaacaatagtttgtactgcaaaaataatatctatttttgttttcgaagatatggtaaaattaaatagtagtacacagcatgttataactaacagcagcaacggctcgtaattacttatcatttactagacgaaaaggtggtgggatattttcttgctcaaataatacgaatatatcacccatccattttatgcgatgtttatatactctaatctttaatagatctatagacgacgggtttaccaacaatatagattttatcgattcatctaatttaaacccttccttaaacgtgaatgatctattatctggcataacgatgactctacctgatgaatcggacaatgtactgggccatgtagaataaattatcaacgaattatcgtctacgaacatttatatcatttgttttaattttaggacgcgaataaatggatataaaatagaaaataacagatattacaaccagtgttatggccgcgcccaaccaggtaggcagttttattttatcttttactacaggttctcctggatgatgtacgttaccaactgcagacgtagttctagtacaattagacgtaagttccgcttgggaattttttaacgctaaagagttaacgttaatcgtgcacccaacgtatttacatctagttctttgaacatcttgattataatataaccattttctatctctagattcgtcggtgcactcatgtaaccaacataccctaggtcctaaatatttatctccggaattagattttggataattcgcgcaccaacaatttctatttcctttatgatcgttacaaaagacgtataatgccgtatccccaaaagtaaaataatcaggacgaataattctaataaactcagaacaatatctcgcatccatatgtttggagcaaatatcggaataagtagacatagccggtttccgttttgcacgtaaccattctaaacaattggggtttccaggatcgtttctacaaaatccagtcatgaaatcatcacaatgttctgtcttgtaattattattaaatatttttggacagtgtttggtatttgtcttagaacaacattttgccacgctatcactatcgcccaggagataatccttttttataaaatgacatcgttgcccggatgctatataatcagtagcgtgttttaaatccttaatatattcaggagttacctcgttctgataatagattaatgatccaggacgaaatttgaaagaactacatggttctccatgaattaatacatattgtttagcaaattcaggaactataaaactactacaatgatctatcgacataccatctatcaaacaaaatttgggtttaatttctcctggagacgtttcataataatacatataactttcttcggcaaacttaacagctctattatattcaggataattaaaacctaattccatatatttgtctcgtatatctgctattcctggtgctattttaattctattaagagtaacggctgcccccatttttaataatcgtcagtatttaaactgttaaatgttggtatatcaacatttaccttatttcccgcagtataaggtttgttgcaggtatactgttcaggaatggttacatttatacttcttctatagtcctgtctttcgatgttcatcacatatgcaaagaacagaataaacaaaataatgtaagaaataatattaaatatctgtgaattcgtaaatacattgattgccataataattacagcagctacaatacatacaatagacattcccacagtgttgccattacctccacgatacatttgagttactaagcaataggtaataactaagctagtaagaggcaatagaaaagatgagataaatatcatcaatatagagattagaggagggctatatagagccaagacgaacaaaatcaaaccgagtaacgttctaacatcattatttttgaagattcccaaataatcattcattcctccataatcgttttgcatcatacctccatctttaggcataaacgattgctgctgttcctctgtaaataaatctttatcaagcactccagcacccgcagagaagtcgtcaagcatattgtaatatcttaaataactcatttatatattaaaaaatgtcactattaaagatggagtataatctttatgccgaactaaaaaaaatgacttgtggtcaacccctaagtctttttaacgaagacggggattttgtagaagttgaaccgggatcatcctttaagtttctgatacctaagggattttacgcctctccttccgtaaagacgagtctagtatttgaaacattaacaacgaccgataataaaatcactagtatcaatccaacaaatgcgccaaagttatatcctcttcaacgcaaagtcgtatctgaagtagtttctaatatgaggaaaatgatcgaatcaaaacgtcctctatacattactcttcacttggcgtgtggatttggtaagactattaccacgtgttatcttatggctacacacggtagaaaaaccgtcatttgcgtacccaataaaatgttaatacatcaatggaagacacaggtagaggcagtcggattggaacataagatatccatagatggagtaagtagtctattaaaggaactaaagactcaaagtccggatgtattaatagtagtcagtagacatctgacaaacgatgccttttgtaaatatatcaataagcattatgatttgttcatcttggatgaatcacatacgtataatctgatgaacaatacagcagttacaagatttttagcgtattatcctccgatgatgtgttattttttaactgctacacctagaccatctaacagaatttattgtaacagtattattaatattgccaagttatccgatctaaaaaaaactatctatgcggtagatagtttttttgagccatattccacagacaatattagacatatggtaaaacgactagatggaccatctaataaatatcatatatataccgagaagttattatctgtagacgagcctagaaatcaacttattcttaataccctggtagaagaattcaagtcaggaactattaatcgcattttagttattactaaactacgtgaacatatggtattattctacaaacgattattagatcttttcggaccagaggttgtatttataggagacgcccaaaatagacgtactccagatatggtcaaatcaatcaaggaactaaatagatttatattcgtatccaccttattttattccggtactggtttagatattcctagtttggattctttgttcatttgctcggcagtaatcaacaatatgcaaatagagcaattactagggaggatatgtcgagaaacagaactattagataggacggtatatgtatttcctagcacatccatcaaagaaataaagtacatgataggaaatttcgttcaacgaattattagtctgtctgtagataaactaggatttaaacaaaaaagttatcggaaacatcaagaatccgatcccacttctgcatgtacaacatcatccagagaagaacgtgtattaaatagaatatttaactcgcaaaatcgttaagaagtttaagcgacgatccgcatgctgcgcaggccagtgtattacccctcatagtattaatataatccaatgatacttttgtgatgtcggaaatcttaaccaatttagactgacaggcagaacacgtcatgcaatcatcatcgtcatcgataactgtagtcttgggcttctttttgcgactcttcattccggaacgcacattggtgctatccatttaggtagtaaaaaataagtcagaatatgccctatagcacgatcgtgcaaaacctggtatatcgtctctatctttatcacaatatagtgtatcgacatttttattattattgacctcgtttatcttggaacatggaatggaaacatttttgttatcaacggccacctttgccttaattccagatgttgtaaaattataactaaacagtctatcatcgacacaaatgaaattcttgtttagacgtttgtagtttacgtatgcggctcgttcgcgtctcattttttcagatattgcaggtactataatattaaaaataagaatgaaataacataggattaaaaataaagttatcatgacttctagcgctgatttaactaacttaaaagaattacttagtctgtacaaaagtttgagattttcagattctgcggctatagaaaagtataattctttggtagaatggggaacatctacttactggaaaataggcgtgcaaaaggtagctaatgtcgagacgtcaatatctgattattatgatgaggtaaaaaataaaccgtttaatattgatccgggctattacattttcttaccggtatattttgggagcgtctttatttattcgaagggtaaaaatatggtagaacttggatctggaaactcttttcaaataccagataatatgcgaagtgcgtgtaacaaagtattagatagtgataacggaatagactttctgagatttgttttgttaaacaatagatggataatggaagatgctatatcaaaatatcagtctccagttaatatatttaaactagctagtgagtacggattaaacatacccaaatatttagaaattgaaatagaggaagacacattatttgacgacgagttatactctattatagaacgctcttttgatgataaatttccaaaaatatccatatcgtatattaagttgggagaacttaggcggcaagttgtagactttttcaaattctcattcatgtatattgagtccatcaaggtagatcgtataggagataatatttttattcctagcgttataacaaaatcaggaaaaaagatattagtaaaagatgtagaccatttaatacgatccaaggttagagaacatacatttgtaaaagtaaaaaagaaaaacacattttccattttatacgactatgatggaaacggaacagaaactagaggagaagtaataaaacgaattatagacactataggacgagactattatgttaacggaaagtatttctctaaggttggtagtgcaggcttaaagcaattgactaataaattagatattaatgagtgcgcaactgtcgatgagttagttgatgagattaataaatccggaactgtaaaacgaaaaataaaaaaccaatcagcatttgatttaagcagagaatgtttgggatatccagaagcggattttataacgttagttaataacatgcggttcaaaatagaaaattgtaaggttgtaaatttcaatattgaaaatactaattgtttaaataacccgagtattgaaactatatatggaaactttaaccagttcgtctcaatctttaatgtcgtcaccgatgtcaaaaaaagattattcgagtgaaataatatgcgcctttgatataggtgcaaaaaatcctgccagaactgttttagaagtcaaggataactccgttagggtattggatatatcaaaattagactggagttctgattgggaaaggcgcatagctaaagatttgtcacaatatgaatacactacagttcttctagaacgtcagcctagaaggtcgccgtatgttaaatttatctattttattaaaggctttttatatcatacatcggctgccaaagttatttgcgtctcgcctgtcatgtctggtaattcatatagagatcgaaaaaagagatcggtcgaagcatttcttgattggatggacacattcggattgcgagactccgttccggatagacgcaaattagacgatgtagcggatagtttcaatttggctatgagatacgtattagataaatggaatactaattatacaccttataataggtgtaaatctagaaattacataaaaaaaatgtaataatagggataacagggtaat

SEQ ID NO: 60 - DNA, 25970 bp, Vaccinia virus
tagggataacagggtaatttaggtagtaaaaaataagtcagaatatgccctatagcacgatcgtgcaaaacctggtatatcgtctctatctttatcacaatatagtgtatcgacatttttattattattgacctcgtttatcttggaacatggaatggaaacatttttgttatcaacggccacctttgccttaattccagatgttgtaaaattataactaaacagtctatcatcgacacaaatgaaattcttgtttagacgtttgtagtttacgtatgcggctcgttcgcgtctcattttttcagatattgcaggtactataatattaaaaataagaatgaaataacataggattaaaaataaagttatcatgacttctagcgctgatttaactaacttaaaagaattacttagtctgtacaaaagtttgagattttcagattctgcggctatagaaaagtataattctttggtagaatggggaacatctacttactggaaaataggcgtgcaaaaggtagctaatgtcgagacgtcaatatctgattattatgatgaggtaaaaaataaaccgtttaatattgatccgggctattacattttcttaccggtatattttgggagcgtctttatttattcgaagggtaaaaatatggtagaacttggatctggaaactcttttcaaataccagataatatgcgaagtgcgtgtaacaaagtattagatagtgataacggaatagactttctgagatttgttttgttaaacaatagatggataatggaagatgctatatcaaaatatcagtctccagttaatatatttaaactagctagtgagtacggattaaacatacccaaatatttagaaattgaaatagaggaagacacattatttgacgacgagttatactctattatagaacgctcttttgatgataaatttccaaaaatatccatatcgtatattaagttgggagaacttaggcggcaagttgtagactttttcaaattctcattcatgtatattgagtccatcaaggtagatcgtataggagataatatttttattcctagcgttataacaaaatcaggaaaaaagatattagtaaaagatgtagaccatttaatacgatccaaggttagagaacatacatttgtaaaagtaaaaaagaaaaacacattttccattttatacgactatgatggaaacggaacagaaactagaggagaagtaataaaacgaattatagacactataggacgagactattatgttaacggaaagtatttctctaaggttggtagtgcaggcttaaagcaattgactaataaattagatattaatgagtgcgcaactgtcgatgagttagttgatgagattaataaatccggaactgtaaaacgaaaaataaaaaaccaatcagcatttgatttaagcagagaatgtttgggatatccagaagcggattttataacgttagttaataacatgcggttcaaaatagaaaattgtaaggttgtaaatttcaatattgaaaatactaattgtttaaataacccgagtattgaaactatatatggaaactttaaccagttcgtctcaatctttaatgtcgtcaccgatgtcaaaaaaagattattcgagtgaaataatatgcgcctttgatataggtgcaaaaaatcctgccagaactgttttagaagtcaaggataactccgttagggtattggatatatcaaaattagactggagttctgattgggaaaggcgcatagctaaagatttgtcacaatatgaatacactacagttcttctagaacgtcagcctagaaggtcgccgtatgttaaatttatctattttattaaaggctttttatatcatacatcggctgccaaagttatttgcgtctcgcctgtcatgtctggtaattcatatagagatcgaaaaaagagatcggtcgaagcatttcttgattggatggacacattcggattgcgagactccgttccggatagacgcaaattagacgatgtagcggatagtttcaatttggctatgagatacgtattagataaatggaatactaattatacaccttataataggtgtaaatctagaaattacataaaaaaaatgtaataacgttagtaacgccattatggataatctatttacctttctacatgaaatagaagatagatatgccagaactatttttaactttcatctaataagttgcgatgaaataggagatatatatggtcttatgaaagaacgcatttcctcagaggatatgtttgataatatagtgtataataaagatatacatcatgccattaagaaactagtgtattgcgacatccaacttactaaacacattattaatcagaatacgtatccggtatttaacgattcttcacaagtgaaatgttgtcattatttcgatataaactcagataatagcaatattagctctcgtacagtagagatatttgagagggaaaagtcatctcttgtatcatatattaaaactaccaataagaagagaaaggtcaattatggggaaataaagaaaactgtacatggaggcactaatgcaaattacttttccggtaaaaagtctgatgagtatctgagcactacagtcaggtccaacattaatcaaccttggatcaaaaccatttctaagagaatgagagtagatatcattaatcactctatagtaacgcgtggaaaaagctctatattacaaactatagaaattatttttactaatagaacatgtgtgaaaatattcaaggattctactatgcacattattctatccaaggacaaggatgaaaaggggtgtatacacatgattgacaaattattctatgtctattataatttatttctgttgttcgaagatatcatccaaaacgagtactttaaagaagtagctaatgttgtaaaccacgtactcacggctacggcattagatgagaaattattcctaattaagaaaatggctgaacacgatgtttatggagttagcaatttcaaaatagggatgtttaacctgacatttattaagtcgttggatcataccgttttcccctctctgttagatgaggatagcaaaataaagttttttaaggggaaaaagctcaatattgtagcattacgatctctggaggattgtataaattacgtgactaaatccgagaatatgatagaaatgatgaaggaaagatcgactattttaaatagcatagatatagaaacggaatcggtagatcgtctaaaagaattgcttctaaaatgaaaaaaaacactgattcagaaatggatcaacgactagggtataagtttttggtgcctgatcctaaagccggagttttttatagaccgttacatttccaatatgtatcgtattctaattttatattgcatcgattgcatgaaatcttgaccgtcaagcggccactcttatcgtttaagaataatacagaacgaattatgatagaaattagcaatgttaaagtgactcctccagattactcacctataatcgcgagtattaaaggtaagagttatgacgcattagccacgttcactgtaaatatctttaaagaggtaatgaccaaagagggtatatccatcactaaaataagtagttatgagggaaaagattctcatttgataaaaattccgctactaataggatacgggaataaaaatccacttgatacagccaagtatcttgttcctaatgtcataggtggagtctttatcaataaacaatctgtcgaaaaagtaggaattaatctagtagaaaagattacaacatggccaaaatttagggttgttaagccaaactcattcactttctcgttttcctccgtatcccctcctaatgtattaccgacaagatatcgccattacaagatatctctggatatatcacaattggaagcgttgaatatatcatcgacaaagacatttataacggtcaatattgttttgctgtctcaatatttatctagagtgagtctagaattcattagacgtagtttatcatacgatatgcctccagaagttgtctatctagtaaacgcgataatagatagtgctaaacgaattactgaatctattactgactttaatattgatacatacattaatgacctggtggaagctgaacacattaaacaaaaatctcagttaacgattaacgagttcaaatatgaaatgctgcataactttttacctcatatgaactatacacccgatcaactaaagggattttatatgatatctttactaagaaagtttctctactgtatctaccacacttctagatatccagatagagattcgatggtttgtcatcgtatactaacatacggcaaatattttgagacgttggcacatgatgaattagagaattacataggcaacatccgaaacgatatcatgaacaatcacaagaacagaggcacttacgcggtaaacattcatgtactaacaactcctggacttaatcatgcgttttctagcttattgagtggaaagttcaaaaagtcagacggtagttatcgaacacatcctcactattcatggatgcagaatatttctattcctaggagtgttggattttatccggatcaagtaaagatttcaaagatgttttctgtcagaaaataccatccaagtcaatatctttacttttgttcatcggacgttccggaaagaggtcctcaggtaggtttagtatctcaattgtctgtcttgagttccattacaaatatactaacgtctgagtatttggatttggaaaagaaaatttgtgagtatatcagatcatattataaagatgatataagttactttgaaacaggatttccaatcactatagaaaatgctctagtcgcatctcttaatccaaatatgatatgtgattttgtaactgactttagacgtagaaaacggatgggattcttcggtaacttggaggtaggtattactttagttagggatcacatgaatgaaattcgcattaatattggagcgggaagattagtcagaccattcttggttgtggataacggagagctcatgatggatgtgtgtccggagttagaaagcagattagacgatatgacattctctgacattcagaaagagtttccacatgtcatcgaaatggtagatatagaacaatttacttttagtaacgtatgtgaatcggttcaaaaatttagaatgatgtcaaaggatgaaagaaagcaatacgatttatgtgactttcctgccgaatttagagatggatatgtagcatcttcactagtgggaatcaatcacaattctggacccagagctattcttggatgtgctcaagctaaacaagctatctcttgtctgagttcggatatacgaaataaaatagacaatggaattcatttgatgtatccagagaggccaattgtcattagtaaggctttagaaacttcaaagattgcggctaattgcttcggccaacatgttactatagcattaatgtcgtacaaaggtatcaatcaagaggatggaattatcatcaaaaaacaatttattcagagaggcggtctggatatagttaccgcaaagaaacatcaagtagaaattccgttggaaaactttaataacaaagaaagagataggtctaacgcctattcaaaattagaaagtaatggattagttagactgaatgctttcttggaatccggagacgctatggcacgaaatatctcatcaagaactcttgaagatgattttgctagagataatcagattagcttcgatgtttccgagaaatataccgatatgtacaaatctcgcgttgaacgagtacaagtagaacttactgacaaagttaaggtacgagtattaaccatgaaagaaagaagacccattctaggagacaaatttaccactagaacgagtcaaaagggaacagtcgcgtatgtcgcggatgaaacggaacttccatacgacgaaaatggtatcacaccagatgtcattattaattctacatccatcttctctagaaaaactatatctatgttgatagaagttattttaacagccgcatattctgctaagccgtacaacaataagggagaaaaccgacctgtctgttttcctagtagtaacgaaacatccatcgatacatatatgcaattcgctaaacaatgttatgagcattcaaatccgaaattgtctgatgaagaattatcggataaaatcttttgtgaaaagattctctatgatcctgaaacggataagccttatgcatccaaagtattttttggaccaatttattacttgcgtctgagacatttaactcaggacaaggcaaccgttagatgtagaggtaaaaagacgaagctcattagacaagcgaatgagggacgaaaacgtggaggaggtattaagtttggagaaatggagagagactgtttaatagcgcatggcgcagccaatactattacagaagttttgaaagattcggaagaagattatcaagatgtgtatgtttgtgaaaattgtggagacatagcagcacaaatcaagggtattaatacatgtcttagatgttcaaaacttaatctctctcctctcttaacaaaaattgataccacgcacgtatctaaagtatttcttactcaaatgaacgccagaggcgtaaaagttaaattagatttcgaacgaaggcctccttcgttttataaaccattagataaagttgatctcaagccgtcttttctggtgtaatattctagtttggtagtagatacatatcaatatcatcaaattcgagatccgaattataaaatgggcgtggattgttaactatagaatcggacgtctgatattcgaaaatctgtggagtttcaggttttggtggaggtgtaactgctacttgggatactgaagtctgatattcagaaagctgggggatgttctggttcgacatccaccgatggtgtcacatcactaatcggttcggtaacgtctgtggatggaggtgctacttctacagaacctgtagcctcagttgtcaacggagatacatttttaatgcgaggaaatgtataatttggtaatggtttctcatgtggatctgaagaagaggtaagatatctactagaaagataccgatcacgttctagttctcttttgtagaacttaactttttctttctcagcatctagttgatattccaacctcttcacgttactacgttcagatttcaattcacgttcgcatgggttacctccgcagtttttacgagcgatttcacgttcagccttcatgcgtctttccctctctctatcgagtttatcagagcagtctttctgaaggcgatcgaactccataaatttctccaacgctttgattgtttccatagatttccgaagttcagcttttaggactgtgattctttttctttcgaattcacagctggatgtacaaccgtttccattaccgccatctctaagtttcttttctagatcggcaacatttcatccccatgccttttacattcctcgagtctactgtcgtcgaaatatcgttccagctccttttcgacatcaataactttagcacgttgtctctcaagctctcttttgtagttatctgattccctggcacgtttaagatcttcatgcaattgagtcagctcttaacacaatctcttgcttcttcgtcatagtacttacaatcactatgggatccattgttaccacgtctacactcggcgagctcgcgtttaagagattcaatttcccgtttgtattggtccatgtttccattgctaccaccattagatttacaggctgctagttgtcgttcgagatcagaaatacgggttttcttggaattgatttcgtcgatgtacttggcatcgaaacacttattaagttctttttccaattctacgattttatttctttcgcgagtcaattccctcctgtagtaactatctgttttgtcagattcacgctctctacgtagactttcttgcaagttactaatttgttccctagcacgtccgagtttagttttatatgccgaatagagttctgattcatcctttgagcagatctctagagatcgttcaagatccctgattctagtctttagcctatttacctcctcggaagatgctccgttaccgttgcgtttacactcgttaagctgtctatcaagatccatgattctatctctaagacgttgcatctctctttccatatcagcattgctttcattattacgtctgcagtcactcaactgtctttcaatatctgagattctatctctaagacgtcgcatctctctctgtttcggcattggtttcattattacgtctacagtcgttcaactgtctttcaagatctgatattctagattggagtctgctaatctctgtagcattttcacggcattcactcagttgtctttcaagatctgagattttagattggagtctgctaatctctgtaagatttcctcctccgctctcgatgcagtcggtcaacttattctctagttctctaatacgcgaacgcagtgcatcaacttcttgcgtgtcttcctggttgcgtgtacattcatcgagatctctaacgcgtcgtcgttcttcctcaagttctctgcgtactacagaaagcgtgtccctatcttgttgatatttagcaatttctgattctagagtactgattttgcttacgtagttactaatatttgtcttggccttatcaagatcctccttgtatttgtcgcattccttgatatccctacgaagtctggacagttcccattcgacattacgacgtttatcgatttcagctcggagatcgtcatcgcgttgttttagccacatacgactgagttcaagttctcgttgacaagatccatctacttttccattcctaatagtatccagttccttttctagttctgaacgcatttctcgttccctatcaagcgattctctcaattctcggatagtcttcttatcaatttctaataaatctgaaccatcatctgtcccattttgaatatccctgtgttctttgatctcttttgtaagtcggtcgattctttcggttttataaacagaatccctttccaaagtcctaatcttactgagtttatcactaagttctgcattcaattcggtgagttttctcttggcttcttccaactctgttttaaactctccactatttccgcattcttcctcgcatttatctaaccattcaattagtttattaataactagttggtaatcagcgattcctatagccgttcttgtaattgtgggaacataattaggatcttctaatggattgtatggcttgatagcatcatctttatcattattagggggatggacaaccttaattggttggtcctcatctcctccagtagcgtgtggttcttcaataccagtgttagtaataggcttaggcaaatgcttgtcgtacgcgggcacttcctcatccatcaagtatttataatcgggttctacttcagaatattcttttctaagagacgcgacttcgggagttagtagaagaactctgtttctgtatctatcaacgctggaatcaatactcaagttaaggatagcgaatacctcatcgtcatcatccgtatcttctgaaacaccatcatatgacatttcatgaagtctaacgtattgataaacagaatcagatttagtattaaacagatccttaacctttttagtaaacgcatatgtatattttagatctccagatttcataatatgatcacatgccttaaatgtcagtgcttccatgatataatctggaacactaatgggtgacgaaaaagatacagcaccatatgctacgttgataaataaatctgaaccactaagtagataatgattaatgttaaggaaaagaaaatattcagtgtataggtatgtcttggcgtcatatcttgtactaaacacgctaaacagtttattgatgtgatcaatttccaacagaataattagagcagcaggaataccaacaaacatattaccacatccgtattttctatgaatatcacatatcatgttaaaaaatcttgatagaagagcgaatatctcgtctgacttaatgagtcgtagttcagcagcaacataagtcataactgtaaatagaacatactttcctgtagtgttgattctagactccacatcaacaccattattaaaaatagttttatatacatctttaatctgctctccgttaatcgtcgaacgttctagtatacggaaacactttgatttcttatctgtagttaatgacttagtgatatcacgaagaatattacgaattacatttcttgtttttcttgacagacctgattcagaactcaactcatcgttccatagtttttctacctcagtggcgaaatctttggagtgcttggtacatttttcaataaggttcgtgacctccatttattataaaaaattttattcaaaacttaactacaatcgggtaattataaaatcgtagatctcccatgtggtggaatactaccatctatcgcatgtggatggacagtaggtaatggccatgggaacagtaatgtttgcatatttatctttcttgccagtattactgcatattgtcccaatgtttcgatgtgatgttctaacctatcaactgccgctgtatcacaacaatagtgtccgatgaaattaagattatgatccaatgtgtttaatatatgattatcaagtcttatacgatccgcgtcttttttgacaggatcaggttcttctacaggaagaagtttcggcctcttatgatattcatgtctgggaaacggtggtctagggtgaggctccggtatcggagtgggttttggattataatcatcatcgtctatgacatcatcttcgacttcgatatttattttgctatcttgatgatgtcctgtatcagttgcattttcagcactcgactgaatattagcgcattcattgtctattattaccatatttctaaatccaaaatgtatatgttgaacatcactactatcgttgatgagtcttatagcatgaattcgcttatcgttatcgggtttagcttctgtcaccttagcaattccttttttattaaactctacataatcatatccatttctattgtttgttctaatataaacgagtatagcatcattgctaaatttttcaatagtatcgaaaacagaatatcctaaaccatataatatatattcaggaacactcaaactaaatgtccaggattctcctaaatacgtaaactttaatagtgcgaaatcattcaaaaatctaccacttatagatagatagtacataaatgcgtatagtagtctacctatctctttattatgaaaaccggcattacgatcatatatatcatgatatacctgtgacccgtttacgttaaaccataaatacatgggtgatcctataaacatgaatttatttctaattctcagagctatagttaattgaccgtgtaatatttgcttacatgcatacttgatacgctcattaataagatttttatcattgctcgttatctcagaatcgtatatataaggagtaccatcgtgattcttaccagatattatacaaaatactatatataaaatatattgaccaacgttagtaatcatataaatgtttaacgttttaaattttgtattcaatgatccattatcatacgctagcatggtcttatgatattcattctttaaaatataatattgtgttagccattgcattggggctcctaatggagattttttattctcatccattttaggataggctttcataaagtccctaataacttcgtgaataatgtttctatgttttctactgatgcatgtatttgcttcgatttttttatcccatgtttcatctatcatagatttaaacgcagtaatgctcgcaacattaacatcttgaaccgttggtacaattccgttccataaatttataatgttcgccatttatataactcattttttgaatatacttttaattaacaaaagagttaagttactcatatggacgccgtccagtctgaacatcaatctttttagccagagatatcatagccgctcttagagtttcagcgtgattttccaacctaaatagaacttcatcgttgcgtttacaacacttttctatttgttcaaactttgttgttacattagtaatctttttttccaaattagttagccgttgtttgagagtttcctcattgtcgtcttcatcggctttaacaattgcttcgcgtttagcctctggctttttagcagcctttgtagaaaaaaattcagttgctggaattgcaagatcgtcatctccggggaaaagagttccgtccatttaaagtacagattttagaaactgacactctgcgttatttatatttggtacaacacatggattataaatatcgatgttaataacatcagaaaatgtaaagtctatacattgttgcatcgtgttaaattttctaatggatctagtattattgggtccaacttctgcctgaaatccaaatatggaagcggatacaaaaccgtttcctggataaaccacacatctccacttttgctttacatcagaaattgtgtcgttgacatcttgaactctcctatctaatgccggtgttccacctatagattttgaatattcgaatgctgcatgagtagcattaaattccttaatattgccataattttcatatattgagtaaccctggataaaaagtaaacacaccgcagccgtcgctaccacaataaaaaaaattgatagagagttcatttataatctattagaagctgacaaaatttttttacacgcatcagacaatgctttaataaatagttcaacatctacttttgtcatatcgaaccgatggtatgattctaacctagaattacatccgaaaaagttgactatgttcatagtcattaagtcattaacaaacaacattccagactctggattataagacgatactgtttcgtcacaattacctaccttaatcatgtgattatgaatattggctattagagcaccttctaagaaatctataatatctttgaaacacgatttaaaatcaaaccacgaatatacttctacgaagaaagttagtttacccataggagagataactataaatggagatctagatacaaaatccggatctatgatagttttaacattattatattctctattaaatacctccacatctaaaaatgttaattttgaaactatgtcttcgtttattaccgtacctgaactaaacgctataagctctattgtttgagaactctttaaacgatattcttgaaatacatgtaacaaagtttcctttaactcggtcggtttatctaccatagttacagaatttgtatccttatctataatataataatcaaaatcgtataaagttatataattatcgcgttcagattgggatcttttcaaatagactaaaaaccccatttctctagtaagtatcttatgtatatgtttgtaaaatatcttcatggtgggaatatgctctaccgcagttatccattcctcattgacagcggtagatgtattagacaaaactattccaatgtttaacaagggccattttacgagattattaaatccttgtttgataaatgtagccaatgagggttcgagttcaacgacgattgaattctcttcccgcggatgctgcatgatgaacgacgggatgttgttcgattgatttggaattctttttcgactttttgtttatattaaatattttaaaatttatagcggatagcaattcatgtaccacggataatgtagacgcgtattgcgcatcgatatctttattattagataaatttatcaataaatgtgagaagtttgcctcgttaaggtcttccatttaaatattatataaacatttgtgtttgtatcttattcgtcttttatggaatagttttttactagtaaagctgcaattacacactttgtccgtaaaacataaatataaacaccagcttttatcaatcgttccaaaaagtcgacggcggacatttttaacatggcatctattttaaatacacttaggtttttggaaaaaacatcattttataattgtaacgattcaataactaaagaaaagattaagattaaacataagggaatgtcatttgtattttataagccaaagcattctaccgttgttaaatacttgtctggaggaggtatatatcatgatgatttggttgtattggggaaggtaacaattaatgatctaaagatgatgctattttacatggatttatcatatcatggagtgacaagtagtggagcaatttacaaattgggatcgtctatcgatagactttctctaaataggactattgttacaaaagttaataattatgatgatacattttttgacgacgatgattgatcgctattgcacaattttgtttttgtactttctaatatagtgtttaggttctttttcatatgagaatattgatttactaaaatatctatgtttaacttttgttctataacgtccttatcggcggtatcggtacatatacgtaattcaccttcacaaaatacggagtcttcgataataatagccaatcgattattggatctagctgtctgtatcatattcaacatgtttaatatatcctttcgtttcccctttacaggcatcgatcgtagcatattttccgcgtctgagatggaaatgttaaaactacaaaaatgcgtaatgttagcccgtcctaatattggtacgtgtctataagtttggcatagtagaataatagacgtgtttaaatgccttccaaagtttaagaattctattagagtattgcattttgatagtttatcgcctacatcatcaaaaataagtaaaaagtgtgctgattttttatgattttgtgcgacagcaatacatttttctatgttacttttagttcgtatcagattatattctagagcttcctgactactaacgaaattaatatgatttggccaaatgtatccatcataatctgggttataaacgggtgtaaacaagaatatatgtttatattttttaactagtgtagaaaacagagatagtaaatagatagtttttccagatccagatcctcccgttaaaaccattctaaacggcatttttaataaattttctcttgaaaattgtttttcttggaaacaattcataattatatttacagttactaaattaatttgataataaatcaaaatatggaaaactaaggtcgttagtagggaggagaacaaagaaggcacatcgtgacataaataacatttattatcatgatgacaccagaaaacgacgaagagcagacatctgtgttctccgctactgtttacggagacaaaattcagggaaagaataaacgcaaacgcgtgattggtctatgtattagaatatctatggttatttcactactatctatgattaccatgtccgcgtttctcatagtgcgcctaaatcaatgcatgtctgctaacgaggctgctattactgacgccgctgttgccgttgctgctgcatcatctactcatagaaaggttgcgtctagcactacacaatatgatcacaaagaaagctgtaatggtttatattaccagggttcttgttatatattacattcagactaccagttattctcggatgctaaagcaaattgcactgcggaatcatcaacactacccaataaatccgatgtcttgattacctggctcattgattatgttgaggatacatggggatctgatggtaatccaattacaaaaactacatccgattatcaagattctgatgtatcacaagaagttagaaagtatttttgtgttaaaacaatgaactaatatttatttttgtacattaataaatgaaatcgcttaatagacaaactgtaagtaggtttaagaagttgtcggtgccggccgctataatgatgatactctcaaccattattagtggcataggaacatttctgcattacaaagaagaactgatgcctagtgcttgcgccaatggatggatacaatacgataaacattgttatttagatactaacattaaaatgtctacagataatgcggtttatcagtgtcgtaaattacgagccagattgcctagaccggatactagacatctgagagtattgtttagtattttttataaagattattgggtaagtttaaaaaagaccaataataaatggttagatattaataatgataaagatatagatattagtaaattaacaaattttaaacaactaaacagtacgacggatgctgaagcgtgttatatatacaagtctggaaaactggttaaaacagtatgtaaaagtactcaatctgtactatgtgttaaaaaattctacaagtgacaacaaaaaatgaattaataataagtcgttaacgtacgccgccatggacgccgcgtttgttattactccaatgggtgtgttgactataacagatacattgtatgatgatctcgatatctcaatcatggactttataggaccatacattataggtaacataaaaactgtccaaatagatgtacgggatataaaatattccgacatgcaaaaatgctactttagctataagggtaaaatagttcctcaggattctaatgatttggctagattcaacatttatagcatttgtgccgcatacagatcaaaaaataccatcatcatagcatgcgactatgatatcatgttagatatagaagataaacatcagccattttatctattcccatctattgatgtttttaacgctacaatcatagaagcgtataacctgtatacagctggagattatcatctaatcatcaatccttcagataatctgaaaatgaaattgtcgtttaattcttcattctgcatatcagacggcaatggatggattataattgatgggaaatgcaatagtaattttttatcataaaagttgtaaagtaaataataaaacaataaatattgaactagtagtacgtatattgagcaatcagaaatgatgctggtacctcttatcacggtgaccgtagttgcgggaacaatattagtatgttatatattatatatttgtaggaaaaagatacgtactgtctataatgacaataaaattatcatgacaaaattaaaaaagataaagagttctaattccagcaaatctagtaaatcaactgatagcgaatcagactgggaggatcactgtagtgctatggaacaaaacaatgacgtagataatatttctaggaatgagatattggacgatgatagcttcgctggtagtttaatatgggataacgaatccaatgttatggcgcctagcacagaacacatttacgatagtgttgctggaagcacgctgctaataaataatgatcgtaatgaacagactatttatcagaacactacagtagtaattaatgaaacggagactgttaaagtacttaatgaagataccaaacagaatcctaactattcatccaatcctttcgtaaattataataaaaccagtatttgtagcaagtcaaatccgtttattacagaacttaacaataaatttagtgagaataatccgtttagacgagcacatagcgatgattatcttaataagcaagaacaagatcatgaacacgatgatatagaatcatcggtcgtatcattggtgtgattagtttcctttttataaaattgaagtaatatttagtattattgctgccgtcacgttgtacaaatggagatattccctgtattcggcatttctaaaattagcaattttattgctaataatgactgtagatattatatagatacagaacatcaaaaaattatatctgatgagatcaatagacagatggatgaaacggtacttcttaccaacatcttaagcgtagaagttgtaaatgacaatgagatgtaccatcttattcctcatagattatcgacgattatactctgtattagttctgtcggaggatgtgttatctctatagataatgacgtcaatggcaaaaatattctaacctttcccattgatcatgctgtaatcatatccccactgagtaaatgtgtcgtagttagcaagggtcctacaaccatattggttgttaaagcggatatacccagcaaacgattggtaacatcgtttacaaacgacatactatatgtaaacaatctgtcactgattaattatttgccgttgtctgtattcattattagacgagttaccgactatttggatagacacatatgcgatcagatatttgcgaataataagtggtattccattataaccatcgacaataagcagtttcctattccatcaaactgtataggtatgtcctctgccaagtacataaattctagcatcgagcaagatactttaatacatgtttgtaacctcgagcatccattcgacttagtatacaaaaaaatgcagtcgtacaattctgtacctatcaaggaacaaatattgtacggtagaattgataatataaatatgagcattagtatttctgtgtattaatagatttctagtatggggatcattaatcatctctaatctctaaatacctcataaaacgaaaaaaaagctattatcaaatactgtacggaatggattcattctcttctctttttatgaaactctgttgtatatctactgataaaactggaagcaaaaaatctgataaaaagaataagaataagatcaaggattatatggaacacgattattataaaataacaatagttcctggttcctcttccacgtctactagctcgtggtattatacacatgcctagtaatagtctctttgcgttgatggaaagcagactagaaataacaggctaaaatgttcagacaccataatagttcccaacccagataataacagagttccatcaacacattcctttaaactcaatcccaaacccaaaaccgttaaaatgtatccggccaattgatagtagataatgaggtgtacagcacatgataatttacacagtaaccaaaatgaaaacactttagtaattataagaaatatagacggtaatgtcatcatcaacaatccgataatatgcctgagagtaaacattgacggataaaacaaaaatgctccgcataactctatcatggcaataacacaaccaaatacttgtaagattcctaaattagtagaaaatacaacggatatcgatgtataagtgatctcgagaaataataagaataaagtaatgcccgtaaagataaacatcaacattgtttggtaatcattaaaccaattagtatgaagttgaactaatttcacagtagattttattccagtattatccccgcatgtatacgtacctggtaagatatctttatattctataatcaatgagacatcactatccgataacgaatgaagtctagcactagtatgccatttacttaatatggtcgtcttggaagttttattataagttaaaatatcatggttatccaatttccatctaatatactttgtcggattatctatagtacacggaataatgatggtatcattacatgctgtatactctatggtctttgtagttgttataacaaccaacgtatagaggtatatcaacgatattctaactcttgacattttttatttatttaaaatgatacctttgttatttattttattctattttgctaacggtattgaatggcataagtttgaaacgagtgaagaaataatttctacttacttattagacgacgtattatacacgggtgttaatggggcggtatacacattttcaaataataaactaaacaaaactggtttaactaataataattatataacaacatctataaaagtagaggatgcggataaggatacattagtatgcggaaccaataacggaaatcccaaatgttggaaaatagacggttcagacgacccaaaacatagaggtagaggatacgctccttatagcaaagtaacgataatcagttacaacgaatgtgtactatctgacataaacatatcaaaagaaggaattaaacgatagagaagatttgacggaccatgtggttatgatttattcacggcggataacgtaattccaaaagatggtttacgaggagcattcgtcgataaagacggtacttatgacaaagtttacattcttttcactgatactatcggctcaaagagaattgttaaaattccgtatataacacaaatgtgcttaaacgacgaaggtggtccatcatcgttgtctagtcatagatggtcgacgtttctcaaagtcgaattagaatgtgacatcgacggaagaagttatagataaattattcattctaaaactataaaaacagataatgatacgatactatatgtattcttcgatagtccgcattatgtacctattctatgaataccattaaacaatctttttctacgtcaaaattggaaggatatacaaagcaattgccgtctccagctcctggtatatgtctaccagctggaaaagttgttccacataccacgtttgaagtcatagaaaaatataatgtactagatgatattataaagcctttatctaaccaacctatcttcgaaggaccgtctggcgttaaatggttcgatataaaggagaaggaaaatgaacatcgggaatatagaatatacttcataaaagaaaattctatatattcattcgatacaaaaactaaacaaactcgcagtgcacaagtcaatgcacaactattttcagtaatggtaactgcgaaaccgttatttatagcagatatagggataggagtaggaatgccacaaatgaaaaaaatacttaaaatgtaatcttaatcgagtacaccacacgacaatgaacaaacataagacagattatgctggttatgcttgctgcgtaatatgcggtctaattgttggaattatttttacagcgacactattaaaagttgtagaacgtaaattagttcatacaccatcaatagataaaacgataaaagatgcatatattagagaagattgtcctactgactggataagctataataataaatgtatccatttatctactgatcgaaaaacctgggaggaaggacgtaatacatgcaaagctctaaatccaaattcggatctaattaagatagagactccaaacgagttaagttttttaagaagcattagacgcggatattgggtaggagaatccgaaatattaaaccagacaaccccatataattttatagctaagaatgccacgaagaatggaaatatatttgtagtacaacgaatactcccaaactgcattcgtgttacactatataacaattacactacatttttatcataccactacttcggttagatgttttagaaaaaaataaatatcgccgtaccgttcttgtttttataaaaataacaattaacaattatcaaattttttctttaatattttacgtggttgaccattcttggtggtaaaataatctcttagtgttggaatggaatgctgtttaatgtttccgcactcatcgtatattttgacgtatgcagtcacatcgtttacgcaatagtcagactgtagttctatcatgcttcctacatcagaaggaggaacagttttaaagtctcttggttttaatctattgccattagttttcatgaaatcctttgttttatccacttcacattttaaataaatgtccactatacattcttttgttaattttactagatcgtcatgggtcatagaatttataggttccgtagtccatggatccaaactagcaaacttcgcgtatacggtatcgcgattagtgtatacaccaactgtatgaaaattaagaaaacagtttaataaatcaacagaaatatttaatcctccgtttgatacagatgcaccatatttatggatttcggattcacacgttgtttgtctgaggtgttcgtctagtgttgcttctacataaacttcgattcccatatattctttattgtcagaatcgcataccgatttatcatcatacactgtttgaaaactaaatggtatacacatcaaaataataaataataacgagtacattctgcaatattgttatcgtaattggaaaaatagtgttcgagtgagttggattatgtgagtattggattgtatattttattttatattttgtaataagaatagaatgctaatgtcaagtttattccaatagatgtcttattaaaaaacatatataataaataacaatggctgaatggcataaaattatcgaggatatctcaaaaaataataagttcgaggatgccgccatcgttgattacaagactacaaagaatgttctagctgctattcctaacagaacatttgccaagattaatccgggtgaaattattcctctcatcactaatcgtaatattctaaaacctcttattggtcagaaatattgtattgtatatactaactctctaatggacgagaacacgtatgctatggagttgcttactgggtacgcccctgtatctccgatcgttatagcgagaactcataccgcacttatatttttgatgggtaagccaacaacatccagacgtgacgtgtatagaacgtgtagagatcacgctacccgtgtacgtgcaactggtaattaaaataaaaagtaatattcatatgtagtgtcaattttaaatgatgatgatgaaatggataatatccatattgacgatgtcaataatgccggtattggcatacagctcatcgatttttagatttcattcagaggatgtggaattatgttatgggcatttgtattttgataggatctataatgtagtaaatataaaatataatccgcatattccatatagatataattttattaatcgcacgttaaccgtagatgaactagacgataatgtcttttttacacatggttattttttaaaacacaaatatggttcacttaatcctagtttgattgtctcattatcaggaaacttaaaatataatgatatacaatgctcagtaaatgtatcgtgtctcattaaaaatttggcaacgagtacatctactatattaacatctaaacataagacttattctctacatcggtccaagtgtattattataataggatatgattctattatatggtataaagatataaatgacaagtataatggcatctatgattttactgcaatatgtatgctaatagcgtctacattgatagtgaccatatacgtgtttaaaaaaataaaaatgaactcttaattatgctatgctattagaaatggataaaatcaaaattacggttgattcaaaaattggtaatgttgttaccatatcgtataacttggaaaagataactattgatgttacaccaaaaaagaaaaggatgtattattagcgcaatcagttgctgtcgaagaggcaaaagatgtcaaggtagaagaaaaaaatattatcgatattgaagatgacgatgatatggatgtagaaagcgcataatacgatctataaaaataagtatataaatactttttatttactgtactcttactgtgtagtggtgataccctactcgattatttttttaaaaaaaaaatacttattctgattcttctaaccatttccgtgttcgttcgaatgccacatcgacgtcaaagataggggagtagttgaaatctagttctgcattgttggtacgcacctcaaatgtagtgttggatatcttcaacgtatagttgttgagtagtgatggttttctaaatagaattctcttcatatcattcttgcacgcgtacatttttagcatccatcttggaatcctagatccttgttctattcccaatggtttcatcaatagaagattaaacatatcgtacgaacacgatggagagtaatcgtagcaaaagtaagcatttcctttaatcttagatcccggatactggatatattttgcagccaacacgtgcatccatgcagcatttcctacatatacccggctatgtaccgcgttatcatcgactgtacgatacataatgttaccgtgttgcttacattgctcgtaaaagactttcgtcaatttgtctccttctccgtaaattccagtgggtcttaggcaacaagtatacaattttgctccattcatgattacggaattattggctttcataaccagttgctcggccatacgtttactttttgcgtatacatgtcctggtgatatatcataaagggtatgctcatggccgatgaatggatcaccgtgtttattgggtcctattgcttccatgctactagtatagatcaaatacttgattcctaggtccacacaagctgccaaaatagtctgtgttccataatagtttactttcatgatttcattatcggtgtattttccaaatacatccactagagcagctgtatgaataatcagatttaccccatttagcgcttctctcaccttatcaaagtcgtttatatcacattgtatatagtttataaccttaactttcgaggttattggttgtggatcttctacaatatctatgactctgatttcttgaacatcatctgcactaattaacagttttactatatacctgcctagaaatccggcaccaccagtaaccgcgtacacggccattgctgccacttataatatcaaactacttattctattttactaaataatggctgtttgtataataaaccacgataatatcagaggagttatttactttgaaccagttcatggaaaagataaagttttaggatcagttattggattaaaatccggaacgtatagtttgataattcatcgttacggagatattagtcaaggatgtgattccataggcagtccagaaatatttatcggtaacatctttgtaaacagatatggtgtagcatatgtttatttagatacagatgtaaatatatttacaattattggaaaggcgttatctatttcaaaaaatgatcagagattagcgtgtggagttattggtatttcttacataaatgaaaagataatacattttcttacaattaacgagaatggcgtttgatatatcagttaatgcgtctaaaacaataaatgcattagtttacttttctactcagcaaaataaattagtcatacgtaatgaagttaatgatacacactacactgtcgaatttgatagggacaaagtagttgacacgtttatttcatataatagacataatgactccatagagataagaggggtgcttccagaggaaactaatattggttgcgcggttaatacgccggttagtatgacttacttgtataataagtatagttttaaactgattttagcagaatatataagacacagaaatactatatccggcaatatttattcggcattgatgacactagatgatttggctattaaacagtatggagacattgatctattatttaatgagaaacttaaagtagactccgattcgggactatttgactttgtcaactttgtaaaggatatgatatgttgtgattctagaatagtagtagctctatctagtctagtatctaaacattgggaattgacaaataaaaagtataggtgtatggcattagccgaacatatatctgatagtattccaatatctgagctatctagactacgatacaatctatgtaagtatctacgcgggcacactgagagcatagaggataaatttgattattttgaagacgatgattcgtctacatgttctgccgtaaccgacagggaaacggatgtataattttagggataacagggtaat

SEQ ID NO: 61 - DNA, 28837 bp, Vaccinia virus
tagggataacagggtaattacttattctgattcttctaaccatttccgtgttcgttcgaatgccacatcgacgtcaaagataggggagtagttgaaatctagttctgcattgttggtacgcacctcaaatgtagtgttggatatcttcaacgtatagttgttgagtagtgatggttttctaaatagaattctcttcatatcattcttgcacgcgtacatttttagcatccatcttggaatcctagatccttgttctattcccaatggtttcatcaatagaagattaaacatatcgtacgaacacgatggagagtaatcgtagcaaaagtaagcatttcctttaatcttagatcccggatactggatatattttgcagccaacacgtgcatccatgcagcatttcctacatatacccggctatgtaccgcgttatcatcgactgtacgatacataatgttaccgtgttgcttacattgctcgtaaaagactttcgtcaatttgtctccttctccgtaaattccagtgggtcttaggcaacaagtatacaattttgctccattcatgattacggaattattggctttcataaccagttgctcggccatacgtttactttttgcgtatacatgtcctggtgatatatcataaagggtatgctcatggccgatgaatggatcaccgtgtttattgggtcctattgcttccatgctactagtatagatcaaatacttgattcctaggtccacacaagctgccaaaatagtctgtgttccataatagtttactttcatgatttcattatcggtgtattttccaaatacatccactagagcagctgtatgaataatcagatttaccccatttagcgcttctctcaccttatcaaagtcgtttatatcacattgtatatagtttataaccttaactttcgaggttattggttgtggatcttctacaatatctatgactctgatttcttgaacatcatctgcactaattaacagttttactatatacctgcctagaaatccggcaccaccagtaaccgcgtacacggccattgctgccacttataatatcaaactacttattctattttactaaataatggctgtttgtataataaaccacgataatatcagaggagttatttactttgaaccagttcatggaaaagataaagttttaggatcagttattggattaaaatccggaacgtatagtttgataattcatcgttacggagatattagtcaaggatgtgattccataggcagtccagaaatatttatcggtaacatctttgtaaacagatatggtgtagcatatgtttatttagatacagatgtaaatatatttacaattattggaaaggcgttatctatttcaaaaaatgatcagagattagcgtgtggagttattggtatttcttacataaatgaaaagataatacattttcttacaattaacgagaatggcgtttgatatatcagttaatgcgtctaaaacaataaatgcattagtttacttttctactcagcaaaataaattagtcatacgtaatgaagttaatgatacacactacactgtcgaatttgatagggacaaagtagttgacacgtttatttcatataatagacataatgactccatagagataagaggggtgcttccagaggaaactaatattggttgcgcggttaatacgccggttagtatgacttacttgtataataagtatagttttaaactgattttagcagaatatataagacacagaaatactatatccggcaatatttattcggcattgatgacactagatgatttggctattaaacagtatggagacattgatctattatttaatgagaaacttaaagtagactccgattcgggactatttgactttgtcaactttgtaaaggatatgatatgttgtgattctagaatagtagtagctctatctagtctagtatctaaacattgggaattgacaaataaaaagtataggtgtatggcattagccgaacatatatctgatagtattccaatatctgagctatctagactacgatacaatctatgtaagtatctacgcgggcacactgagagcatagaggataaatttgattattttgaagacgatgattcgtctacatgttctgccgtaaccgacagggaaacggatgtataattttttttatagcgtgaaggatatgataaaaaatataattgttgtatttatcccattccaatcaccttatatgattctgtaaaaaaattatactgtaacacaataaaggagtcttatagatgtatagaggtcagatactggtttgataaactgtttattccacataagtatgtttgactttatggttagacccgcatactttaacaaatcactgaaaattggagttaggtattgacctctcagaatcagttgccgttctggaacattaaatgtattttttatgatatactccaacgcatttatgtgggcatacaacaagtcattactaatggagtattccaagagttttagttgtctagtatttaacaagagaagagatttcaacagactgtttatgaactcgaatgccgcctcattgtcgcttatattgatgatgtcgaattctcccaatatcatcaccgatgagtagctcatcttgttatcgggatccaagttttctaaagatgtcattaaaccctcgatcatgaatggatttatcatcatcgtttttatgttggacatgagcttagtccgtttgtccacatctatagaagatgatttctgaattatttcatatatctctctctttaactccaggaacttgtcaggatggtctactttaatatgttctcgtctaagagatgaaaatctttggatggttgcacgcgacttttctctaaaggatgacgttgcccaagatcctctcttaaatgaatccatcttatccttggacaagatggacagtctattttccttagatggtttaatatttttgttacccatgatctataaaggtagacctaatcgtctcggatgaccatatatttattttcagttttattatacgcataaattgtaaaaaatatgttaggtttacgaaaatgtctcgtggggcattaatcgtttttgaaggattggacaaatctggaaaaacaacacaatgtatgaacatcatggaatctataccggcaaacacgataaaatatcttaactttcctcagagatccactgtcactggaaagatgatagatgactatctaactcgtaaaaaaacctataatgatcatatagttaatctattattttgtgcaaatagatgggagtttgcatcttttatacaagaacaactagaacagggaattactttaatagttgatagatacgcattctctggagtagcgtatgccgccgctaaaggcgcgtcaatgactctcagtaagagttatgaatctggattgcctaaacccgacttagttatattcttggaatctggtagcaaagaaattaatagaaacgtcggcgaggaaatttatgaagatgttacattccaacaaaaggtattacaagaatataaaaaaatgattgaagaaggagatattcattggcaaattatttcttctgaattcgaggaagatgtaaagaaggagttgattaagaatatagttatagaggctatacacacggttactggaccagtggggcaactgtggatgtaatagtgaaattacattttttataaatagatgttagtacagtgttataaatggatgaagcatattactctggcaacttggaatcagtactcggatacgtgtccgatatgcataccgaactcgcatcaatatctcaattagttattgccaagatagaaactatagataatgatatattaaacaaggacattgtaaattttatcatgtgtagatcaaacttggataatccatttatctctttcctagatactgtatatactattatagatcaagagatctatcagaccgaattgattaattcattagacgacaatgaaattatcgattgtatagttaataagtttatgagcttttataaggataacctagaaaatatagtagatgctatcattactctaaaatatataatgaataatccagattttaaaactacgtatgcagaagtactcggttccagaatagcggatatagatattaaacaagtgatacgtgagaatatactacaattgtctaataatatccgcgaacgatatttgtgaaaatattaaaaaaaaatactttttttattaaatgacgtcttttcgtgaatttagaaaattatgctgtgctatatatcacgcatcaggatataaagaaaaatctaaattaattagagactttataacagatagggatgataaatatttgatcattaagctattgcttcccggattagacgatagaatttataacatgaacgataaacaaattataaaattatatagtataatatttaaacaatctcaggaagatatgctacaagatttaggatacggatatataggagacactattagtacattcttcaaagaaaacacagaaatccgtccaagagataaaagcattttaactttagaagacgtggatagtttcttaactacgttatcatccgtaactaaagaattgcatcaaataaaattattgactgatgtagcatctgtttgtacatgtaatgatttaaaatgtgtagtcatgcttattgataaagatctaaaaattaaagcgggccctcggtacgtacttaacgctattagtcctcatgcctatgatgtttttagaaaatctaataacttgaaagagataatagaaaatgcatctaaacaaaatctagactctatatctatttctgttatgactccaattaatcccatgttagcggaatcgtgtgattctgtcaataaggcgtttaaaaaatttccatcaggaatgtttgcggaagttaaatacgatggtgaaagagtacaagttcataaaaataataacgagtttgccttctttagtagaaacatgaaaccagtactctctcataaagtggattatctcaaagaatacataccgaaagcatttaaaaaagctacgtctatcgtattggattctgaaattgttcttgtagacgaacataatgtaccgctcccgtttggaagtttaggtatacacaaaaagaaagaatataaaaactctaacatgtgtttgttcgtgtttgactgtttgtactttgatggattcgatatgacggacattccattgtacgaacgaagatcttttctcaaagatgttatggttgaaatacccaatagaatagtattctcagagttgacgaatattagtaacgagtctcagttaactgacgtattggatgatgcactaacgagaaaattagaaggattggtcttaaaagatattaatggagtatacgaaccgggaaagagaagatggttaaaaataaagcgagactatttgaacgagggttccatggcagattctgccgatttagtagtactaggtgcttactatggtaaaggagcaaagggtggtatcatggcagtctttctaatgggttgttacgacgataaatccggtaaatggaagacggttaccaagtgttcaggacacgatgataatacgttaagggagttgcaagaccaattaaagatgattaaaattaacaaggatcccaaaaaaattccagagtggttggtagttaataaaatctatattcccgattttgtagtagaggatccaaaacaatctcagatatgggaaatttcaggagcagagtttacatcttccaagtcacatacagcgaatggaatatcgattagatttcctagatttactaggataagagaggataaaacgtggaaagaatctactcatctaaacgatttagtaaacttgactaaatcttaatagttacatacaaactgaaaattaaaataacaccatttagttggtggtcgccatggatggtgttattgtatactgtctaaacgcgttagtaaaacatggcgaggaaataaatcatataaaaaatgatttcatgattaaaccatgttgtgaaaaagttaagaacgttcacatcgacggacaatctaaaaacaatacagtgattgcagatttgccatatctggataatgctgtatcggatgtatgcaaatcgatatatatatagtatcaagaatatccagatttgctaatttgataaagatagatgacgatgacaagactcctactggtgtatataattattttaaacctaaagatgccattcctgttattatatccataggaaaggatagagatgtttgtgaactattaatctcatctgataaagcgtgtgcgtgtatagagttaaattcatataaagtagccattcttcccatggatgtttccttttttaccaaaggaaatgcatcattgattattctcctgtttgatttctctatcgatgcggcacctctcttaagaagtgtaaccgataataatgttattatatctagacaccagcgtctacatgacgagcttccgagttccaattggttcaagttttacataagtataaagtccgactattgttctatattatatatggttgttgatggatctgtgatgcatgcgatagctgataatagaacttacgcaaatattagcaaaaatatattagacaatactacaattaacgatgagtgtagatgctgttattttgaaccacagattaggattcttgatagagatgagatgctcaatggatcatcgtgtgatatgaacagacattgtattatgatgaatttacctgatgtaggcaaatttggatctagtatgttggggaaatatgaacctgacatgattaagattgctcttttggtggctggtaatttaataagaaatcgagactacattcccgggagacgaggatatagctactacgtttacggtatagcctctagataatttttttaagcacgaaataaaaaacataattttaaaccaatctatttcatactattttgtgtgatcaccatggacataaagatagatattagtatttttggtgataaatttacggtgactactaggagggaaaatgaagaaaaaaaaaaatatctacctctccaaaaagaaaaaactactgatgttatcaaacctgattatcttgagtacgatgacttgttagatagagatgagatgtttactattctagaggaatattttatgtacagaggtctattaggcctcagaataaaatatggacgactctttaacgaaattaaaaaattcgacaatgatgcggaagaacaattcggtactatagaagaactcaagcagaaacttagattaaattctgaagagggagcagataactttatagattatataaaggtacaaaaacaggatatcgtcaaacttactgtatacgattgcatatctatgataggattgtgtgcatgcgtggtagatgtttggagaaatgagaaactgttttctagatggaaatattgtttacgagcgattaaactgtttattaatgatcacatgcttgataagataaaatctatactgcagaatagactagtgtatgtggaaatgtcatagaaagttaaaagttaatgagagcaaaaatatataaggttgtattccatatttgttattttttctgtaatagttaaaaaatacattcgatggtctatctatcagattattatgtgttataaggtactttttctcataataaactagagtatgagtaagatagtgtttttcaaaacatataaatctaaaattgatggatgagatatacagctattaatttcgaaaatatattttaatctgataactttaaacatggatttttgatggtggtttaaagtttaaaaaaaagattttgttattgtagtatatgataatatcaaaaagatggatataaagaatttgctgactgtatgtactattttttacattactacattggctacggcagatatacctacttcgtcactgccacacgctccggtaaacggggcatgtgacgagggagaatatcttgataagaggcataatcaatgttgtaatcagtgtccacctggagaatttgccaaggtcagatgtagtggtagtgataacacaaaatgtgaacgctgcccacctcatacatataccgcaatccccaattactctaatggatgtcatcaatgtagaaaatgcccaacaggatcatttgataaggtaaagtgtaccggaacacagaacagtaaatgttcgtgtcttcctggttggtattgcgctactgattcttcacagactgaagattgttgaaattgtgtaccaaaaaggagatgtccatgcggatactttggtggaatagatgaacaaggaaatcctatttgtaaatcgtgctgtattggtgaatattgcaactacctacgtaattatagacttgatccattttctccatgcaaactatctaaatgtaattaattatgattttgatgataatgttaccatacattatatcgctacttggttagtgtattattcagtatgaagacctattaataattacttatcttttgacgatcttgttataattataatataaaaacttatggcatagtaacttataattgctaacacgataaattcgtaataatctgttttgttcaaatttttataaggaatctacaggcataaaaataaaaatataatttataatatactcttacaacgccatcatgaatagcagcagtaaattaattgctgttattaatggatttagaaatagtggacgattttgtgatattaatatagttattaatgatgaaaggataaacgctcataaactcatcctatctggagcctccgaatatttttccattctgttttccaataattttatcgattctaatgaatacgaagttaatctaagtcatttagattatcaaagcgtaaacgatttgatcgattatatttatgggatacctttgagcctaactaacgataacgtgaaatatattctttcaaccgctgattttttacaaattggatctgctattacggagtgtgaaaattacatacttaaaaatctttgttctaaaaactgtatcgatttctacatatacgctgataaatataataacaagaaaatagaatcagcgtcgtttaacacaatattacaaaatattttgagactcatcaacgatgaaaactttaaatacttaacagaggaatcaatgataaaaattttaagcgatgatatgttaaatataaaaaatgaggatttcgccccactaattctcattaaatggttagagagtactcaacaatcatgcaccgtcgagttacttaaatgcctcagaatatcattgctttccccacaagttataaaatcactttatagtcatcaactggttagttcaatctacgaatgtataacattcttaaacaatatagcattcttggatgaatcatttcctagataccatagcatcgagttgatatctatcggtataagtaattcgcgtgataaaatttccataaactgctacaatcataaaaaaaatacatgggaaatgatatcttcacgtagatataggtgtagtttcgcagtggccgtcctggataatattatctatatgatgggtggatatgatcagtccccgtatagaagttcaaaggttatagcgtacaatacatgtacaaattcttggatatatgatataccagagctaaaatatcctcgttctaattgtgggggactggctgatgacgaatacatttattgtataggcggcatacgcgatcaggattcatcgttgacatctagtattgatagatggaagccatcaaaaccatattggcagaagtatgctaaaatgcgcgaaccaaaatgtgatatgggggttgcgatgttaaacggattaatatatgtcatgggtggaatcgttaaaggtgacacgtgtaccgacgcactagagagtttatcagaagatggatggatgaagcatcaacgtcttccaataaaaatgtccaatatgtcgacgattgttcatgatggcaagatttatatatctggaggttacaacaatagtagtgtagttaatgtaatatcgaatctagtccttagctataattcgatatatgatgaatggaccaaattatcatcattaaatattcctagaattaatcccgctctatggtcagcgcataataaattatatgtaggaggaggaatatctgatgatgttcaaactaatacatctgaaacatacgataaagaaaaagattgttggacattggataatggtcacgtgttaccacgcaattatataatgtataaatgcgaaccgattaaacataaatatccattggaaaaaacacagtacacgaatgattttctaaagtatttggaaagttttataggtagttgatagaacaaaatacataattttgtaaaaataaatcactttttatactaatatgacacgattaccaatacttttgttactaatatcattagtatacgctacaccttttcctcagacatctaaaaaaataggtgatgatgcaactctatcatgtaatcgaaataatacaaatgactacgttgttatgagtgcttggtataaggagcccaattctattattcttttagctgctaaaagcgacgtcttgtattttgataattataccaaggataaaatatcttacgactctccatacgatgatctagttacaactatcacaattaaatcattgactgctagagatgccggtacttatgtatgtgcattctttatgacatcaactacaaatgacactgataaagtagattatgaagaatactccacagagttgattgtaaatacagatagtgaatcgactatagacataatactatctggatctacacattcaccggaaactagttctgagaaacctgattatatagataattctaattgctcgtcggtattcgaaatcgcgactccggaaccaattactgataatgtagaagatcatacagacaccgtcacatacactagtgatagcattaatacagtaagtgcaacatctggagaatccacaacagacgagactccggaaccaattactgataaagaagatcatacagttacagacactgtctcatacactacagtaagtacatcatctggaattgtcactactaaatcaaccaccgatgatacgtacaatgataatgatacagtaccaccaactactgtaggcggtagtacaacctctattagcaattataaaaccaaggactttgtagaaatatttggtattaccgcattaattatattgtcggccgtggcaatattctgtattacgtattatatatgtaataaacgttcacgtaaatacaaaacagagaacaaagtctagatttttgacttacataaatgtctgggatagtaaaatctatcatattgagcggaccatctggttcaggaaagacagccatagccaaaagactatgggaatatatttggatttgtggtgtcccataccactagatttcctcgtcctatggaacgagaaggtgtcgattaccattacgttaacagagaggccatctggaagggaatagccgccggaaactttctagaacatactgagtttttaggaaatatttacggaacttctaaaacagctgtgaatacagcggctattaataatcgtatttgtgtgatggatctaaacatcgatggcgttagaagtcttaaaaatacgtacctaatgccttactcggtgtatataagacctacctctcttaaaatggttgaaaccaagcttcgttgtagaaacactgaagctaacgatgagattcatcgtcgcgtgatattggcaaaaacggatatggatgaggccaacgaagcaggtctattcgacactattattattgaagatgatgtgaatttagcatatagtaagttaattcagatactacaggaccgtattagaatgtattttaacactaattaaagacttaagacttaaaacttgataattaataatataactcgtttttatatgtgtctatttcaacgtctaatgtattagttaaatattaaaacttaccacgtaaaacttaaaatttaaaatggtatttcattgacagatagatcacacattatgaactttcaaggacttgtgttaactgacaattgcaaaaatcaatgggtcgttggaccattaataggaaaaggtggatttggtagtatttatactactaatgacaataattatgtagtaaaaatagagcccaaagctaacggatcattatttaccgaacaggcattttatactagagtacttaaaccatccgttatcgaagaatggaaaaaatctcacaatataaagcacgtaggtcttatcacgtgcaaggcatttggtctatacaaatccattaatgtggaatatcgattcttggtaattaatagattaggtgcagatctagatgcggtgatcagagccaataataatagattaccaaaaaggtcggtgatgttgatcggaatcgaaatcttaaataccatacaatttatgcacgagcaaggatattctcacggagatattaaagcgagtaatatagtcttagatcaaatagataagaataaattatatctagtggattacggattggtttctaaattcatgtctaatggcgaacatgttccatttataagaaatccaaataaaatggataacggtactctagaatttacacctatagattcgcataaaggatacgttgtatctagacgtggagatctagaaacacttggatattgtatgattagatggttgggaggtatcttgccatggactaagatatctgaaacaaagaattgtgcattagtaagtgccacaaaacagaaatatgttaacaatactgcgactttgttaatgaccagtttgcaatatgcacctagagaattgctgcaatatattaccatggtaaactctttgacatattttgaggaacccaattacgacgagtttcggcacatattaatgcagggtgtatattattaagtgtggtgtttggtcgatgtaaaatttttgtcgataaaaattaaaaaataacttaatttattattgatctcgtgtgtacaaccgaaatcatggcgatgttttacgcacacgctctcggtgggtacgacgagaatcttcatgcctttcctggaatatcatcgactgttgccaatgatgtcaggaaatattctgttgtgtcagtttataataacaagtatgacattgtaaaagacaaatatatgtggtgttacagtcaggtgaacaagagatatattggagcactgctgcctatgtttgagtgcaatgaatatctacaaattggagatccgatccatgatcaagaaggaaatcaaatctctatcatcacatatcgccacaaaaactactatgctctaagcggaatcgggtacgagagtctagacttgtgtttggaaggagtagggattcatcatcacgtacttgaagcaggaaacgctgtatatggaaaagttcaacatgattattctactatcaaagagaaggccaaagaaatgagtacacttagtccaggacctataattgattaccacgtctggataggagattgtatctgtcaagttactgctgtggacgtacatggaaaggaaattatgaaaatgagattcaaaaagggtgcggtgcttccgatcccaaatctggtaaaagttaaacttggggagaatgatacagaaaatctttcttctactatatcggcggcaccatcgaggtaaccacctctctggaagacagcgtgaataatgtactcatgaaacgtttggaaactatacgccatatgtggtctgttgtatatgatcattttaatattgtgaatggtaaagaatgctgttatgtgcatacgcatttgtctaatcaaaatcttataccgagtactgtaaaaacaaatttgtacatgaagactatgggatcatgcattcaaatggattccatggaagctctagagtatcttagcgaactgaaggaatcaggtggatggagtcccagaccagaaatgcaggaatttgaatatccagatggagtggaagacactgaatcaattgagagattggcagaggagttcttcaatagatcagaacttcaggctggtaaatcagttaaatttggtaattctattaattgttaaacatatacatctgtttcagctaagcaactaagaacacgtatacggcagcagcttccttctatactctcatcttttaccaagggtggatatttgttcattggagttgataataatacacacaaagtaattggattcacggtgggttacgactacctcagactggtagagaatgatatagaaaagcatatcaaaagactttgtgttgtgtatttctgtgagaagaaagaggacatcaagtacacgtgtcgattcatcaaggtatataaacctggggatgagactacctcgacatacgtgtgcgctatcaaagtggaaagatgctgttgtgctgtgtttgcagattggccagaatcatggtatatggatactaatggtatcaataagtattctccagatgaatgggtgtcacatataaaattttaattaatgtaatagagaacaaataataaggttgtaatatcatatagacaataactaacaattaattagtaactgttatctcttttttaactaaccaactaactatatacctattaatacatcgtaattatagttcttaacatctattaatcattaattcgcttctttaattttttataaactaacattgttaattgaaaagggataacatgttacagaatataaattatatatggatttttttaaaaaggaaatacttgactggagtatatatttatctcttcattatatagcacgcgtgttttccaatttttccacatcccatataatacaggattataatctcgttcgaacatacgagaaagtggataaaacaatagttgattttttatctaggttgccaaatttattccatattttagaatatggggaaaatattctacatatttattctatggatgatgctaatacgaatattataattttttttctagatagagtattaaatattaataagaacgggtcatttatacacaatctcgggttatcatcatccattaatataaaagaatatgtatatcaattagttaataatgatcatccagataataggataagactaatgcttgaaaatggacgtagaacaagacattttttgtcctatatatcagatacagttaatatctatatatgtattttaataaatcatggattttatatagatgccgaagacagttacggttgtacattattacatagatgtatatatcactataagaaatcagaatcagaatcatacaatgaattaattaagatattgttaaataatggatccgatgtagataaaaaagatacgtacggaaacacaccttttatcctattatgtaaacacgatatcaacaacgtggaattgtttgagatatgtttagagaatgctaatatagactctgtagactttaatagatatacacctcttcattatgtctcatgtcgtaataaatatgattttgtaaagttattaatttctaaaggagcaaatgttaatgcgcgtaataaattcggaactactccattttattgtggaattatacacggtatctcgcttataaaactatatttggaatcagacacagagttagaaatagataatgaacatatagttcgtcatttaataatttttgatgctgttgaatctttagattatctattatccagaggagttattgatattaactatcgtactatatacaacgaaacatctatttacgacgctgtcagttataatgcgtataatacgttggtctatctattaaacagaaatggtgattttgagacgattactactagtggatgtacatgtatttcggaagcagtcgcaaacaacaacaaaataataatggaagtactattgtctaaacgaccatctttgaaaattatgatacagtctatgatagcaattactaaacataaacagcataatgcagatttattgaaaatgtgtataaaatatactgcgtgtatgaccgattatgatactcttatagatgtacagtcgctacagcaatataaatggtatattttaagatgtttcgatgaaatagatatcatgaagagatgttatataaaaaataaaactgtattccaattagttttttgtatcaaagacattaatactttaatgagatacggtaaacatccttctttcgtgaaatgcactagtctcgacgtatacggaagtcgtgtacgtaatatcatagcatctattagatatcgtcagagattaattagtctattatccaagaagctggatgcgggagataaatggtcgtgttttcctaacgaaataaaatataaaatattggaaaactttaacgataacgaactgtccacatatctaaaaatcttataaacattattaaaatataaaatctaagtaggataaaatcacactacatcattgtttccttttagtgctcgacagtgtatactatttttaacactcataaataaaaatgaaaacgatttccgttgttacgttgttatgcgtactacctgctgttgtttattcaacatgtactgtacccactatgaataacgctaaattaacgtctaccgaaacatcgtttaataataaccagaaagttacatttacatgtgatcagggatatcattctttggatccaaatgctgtctgcgaaacagataaatggaaatacgaaaatccatgcaagaaaatgtgcacagtttctgattatgtctctgaactatataataaaccgctatacgaagtgaattccaccatgacactaagttgcaacggcgaaacaaaatattttcgttgcgaagaaaaaaatggaaatacttcttggaatgatactgttacgtgtcctaatgcggaatgtcaacctcttcaattagaacacggatcgtgtcaaccagttaaagaaaaatactcatttggggaatatataactatcaactgtgatgttggatatgaggttattggtgcttcgtacataagttgtacagctaattcttggaatgttattccatcatgtcaacaaaaatgtgatataccgtctctatctaatggattaatttccggatctacattttctatcggtggcgttatacatcttagttgtaaaagtggttttatactaacgggatctccatcatccacatgtatcgacggtaaatggaatcccatactcccaacatgtgtacgatctaacgaaaaatttgatccagtggatgatggtcccgacgatgagacagatttgagcaaactctcgaaagacgttgtacaatatgaacaagaaatagaatcgttagaagcaacttatcatataatcatagtggcgttaacaattatgggcgtcatatttttaatctccgttatagtattagtttgttcctgtgacaaaaataatgaccaatataagttccataaattgctaccgtaaatataaatccgttaaaataattaataattaataacgaacaagtatcaaaagattaaagaattatagctagaatcaattgagatgtcttcttcagtggatgttgatatctacgatgccgttagagcatttttactcaggcactattataacaagagatttattgtgtatggaagaagtaacgccatattacataatatatacaggctatttacaagatgcgccgttataccgttcgatgatatagtacgtactatgccaaatgaatcacgtgttaaacaatgggtgatggatacacttaatggtataatgatgaatgaacgcgatattactgtatgtgtgggcaccggaatactattcatggaaatgtttttcgattacaataaaaatagtatcaacaatcaactaatgtatgatataattaatagcgtatctataattctagctaatgagagatatagaagcgcttttaacgacgatggtatatacatccgtagaaatatgattaacaagttgtacggatacgcatctctaactactattggcacgatcgctggaggtgtttgttattatctgttgatgcatctagttagtttgtataaataattatttcaatatactagttaaaattttaagattttaaatgtataaaaaactaataacgtttttatttgtaataggtgcagtagcatcctattcgaataatgagtacactccgtttaataaactgagtgtaaaactctatatagatggagtagataatatagaaaattcatatactgatgataataatgaattggtgttaaattttaaagagtacacaatttctattattacagagtcatgcgacgtcggatttgattccatagatatagatgttataaacgactataaaattattgatatgtataccattgactcgtctactattcaacgcagaggtcacacgtgtagaatatctaccaaattatcatgccattatgataagtacccttatattcacaaatatgatggtgatgagcgacaatattctattactgcagagggaaaatgctataaaggaataaaatatgaaataagtatgatcaacgatgatactctattgagaaaacatactcttaaaattggatctacttatatatttgatcgtcatggacatagtaatacatattattcaaaatatgatttttaaaaatttaaaatatattatcacttcagtgacagtagtcaaataacaaacaacaccatgagatatattataattctcgcagttttgttcattaatagtatacatgctaaaataactagttataagtttgaatccgtcaattttgattccaaaattgaatggactggggatggtctatacaatatatcccttaaaaattatggcatcaagacgtggcaaacaatgtatacaaatgtaccagaaggaacatacgacatatccgcatttccaaagaatgatttcgtatctttctgggttaaatttgaacaaggcgattataaagtggaagagtattgtacgggactatgcgtcgaagtaaaaattggaccaccgactgtaacattaactgaatacgacgaccatatcaatttgtacatcgagcatccgtatgctactagaggtagcaaaaagattcctatttacaaacgcggtgacatgtgtgatatctacttgttgtatacggctaacttcacattcggagattctaaagaaccagtaccatatgatatcgatgactacgattgcacgtctacaggttgcagcatagactttgtcacaacagaaaaagtgtgcgtgacagcacagggagccacagaagggtttctcgaaaaaattactccatggagttcggaagtatgtctgacacctaaaaagagtgtatatacatgcgcaattagatccaaagaagatgttcccaatttcaaggacaaaatggccagagttatcaagagaaaatttaataaacagtctcaatcttatttaactaaatttctcggtagcacatcaaatgatgttaccacttttcttagcatgcttaacttgactaaatattcataactaatttttattaatgatacaaaaacgaaataaaactgcatattatacactggttaacgcccttataggctctaaccattttcaagatgaggtccctgattatagtccttctgttcccctctatcatctactccatgtctattagacgatgtgagaagactgaagaggaaacatggggattgaaaatagggttgtgtataattgccaaagatttttatcccgaaagaactgattgcagtgttcatctcccaactgcaagtgaaggattgataactgaaggcaatggattcagggatatacgaaacaccgataaattataaaaaaagcaatgtgtccgctgtttccgttaataatactattttcgtaactggcggattattcataaataactctaatagcacgatcgtggttaacaatatggaaaaacttgacatttataaagacaaacaatggtcgattatagaaatgcctatggctagggtatatcacggcatcgactcgacatttggaatgttatattttgccggaggtctatccgttaccgaacaatatggtaatttagagaaaaacaacgagatatcttgttacaatcctagaacgaataagtggtttgatatttcatatactatttataagatatccatatcatcattgtgtaaactaaataacgtcttctatgtatttagtaaggacattggatatgtggaaaagtatgatggtgcatggaagttagtacatgatcgtctccccgctataaaggcattatcaacttctccttattgattgaaaatgaaaatataaatagtttttatgtatagcagtattaccctatagttttattgcttactactaacatggatacagatgttacaaatgtagaagatatcataaatgaaatagatagagagaaagaagaaatactaaaaaatgtagaaattgaaaataataaaaacattaacaagaatcatcccaatgaatatattagagaagcactcgttattaataccagtagtaatagtgattccattgataaagaagttatagaatgtatctgtcacgatgtaggaatatagatcatatctactaatttttataatcgatacaaaacataaaaaacaactcgttattacatagcaggcatggaatccttcaagtattgttttgataacgatggcaagaaatggattatcggaaatactttatattctggtaattcaatactatataaggtcagaaaaaatttcactagttcgttctacaattacgtaatgaagatagatcacaaatcacacaagccattgttgtctgaaatacgattctatatatctgtattggatcctttgactatcgacaactggacacgggaacgtggtataaagtatttggctattccagatctgtatggaattggagaaaccgatgattatatgttcttcgttataaaaaattcgggaagagtattcgccccaaaggatactgaatcagtcttcgaagcatgtgtcactatgataaacacgttagagtttatacactctcgaggatttacccatggaaaaatagaaccgaggaatatactgattagaaataaacgtctttcactaattgactattctagaactaacaaactatacaagagtggaaactcacatatagattacaacgaggacatgataacttcaggaaatatcaattatatgtgtgtagacaatcatcttggagcaacagtttcaaaacgaggagatttagaaatgttgggatattgcatgatagaatggttcggtggcaaacttccatggaaaaacgaaagtagtataaaagtaataaaacaaaaaaaagaatataaaaaatttatagctactttctttgaggactgttttcctgaaggaaatgaacctctggaattagttagatatatagaattagtatacacgttagattattctcaaactcctaattatgacagactacgtaaactgtttatacaagattgaaattatattctttttttatagagtgtggtagtgttacggatatctaatattaatattagactatctctatcgcgctacacgaccaatatcgattactatggatatcttcagggaaatcgcatcttctatgaaaggagagaatgtatttatttctccagcgtcaatctcgtcagtattgacaatactgtattatggagctaatggatccactgctgaacagctatcaaaatatgtagaaacggaggagaacacggataaggttagcgctcagaatatctcattcaaatccatgaataaagtatatgggcgatattctgccgtgtttaaagattcctttttgagaaaaattggcgataagtttcaaactgttgacttcactgattgtcgcactatagatgcaatcaacaagtgtgtagatatctttactgaggggaaaatcaatccactattggatgaaccattgtctcctagcaattagtgccgtatactttaaagcaaaatggttgacgccattcgaaaaggaatttaccagtgattatcccttttacgtatctccgacggaaatggtagatgtaagtatgatgtctatgtacggcaaggcatttaatcacgcatctgtaaaggaatcattcggcaacttttcaatcatagaactgccatatgttggagatactagtatgatggtcattcttccagacaagattgatggattagaatccatagaacaaaatctaacagatacaaattttaagaaatggtgtgactttatggatgctatgtttatagatgttcacattcccaagtttaaggtaacaggctcgtataatctggtggatactctagtaaagtcaggactgacagaggtgttcggttcaactggagattatagcaatatgtgtaattcagatgtgagtgtcgacgctatgatccacaaaacgtatatagatgtcaatgaagagtatacagaagcagctgcagcaacttgtgcactggtgtcagactgtgcatcaacaattacaaatgagttctgtgtagatcatccgttcatctatgtgattaggcatgttgatggcaaaattcttttcgttggtagatattgctctccaacaactaattgttaaccattttttttaaaaaaatagaaaaaacatgtggtattagtgcaggtcgttattcttccaattgcaattggtaagatgacggccaactttagtacccacgtcttttcaccacagcactgtggatgtgacagactgaccagtattgatgacgtcaaacaatgtttgactgaatatatttattggtcgtcctatgcataccgcaacaggcaatgcgctggacagttgtattccacactcctctcttttagagatgatgcggaattagtgttcatcgacattcgcgagctggtaaaacatatgccgtgggatgatgtcaaagattgtgcagaaatcatccgttgttatataccggatgagcaaaaaaccatcagagagatttcggccatcatcggactttgtgcatatgctgctacttactggggaggtgaagaccatcccactagtaacagtctgaacgcattgtttgtgatgcttgagatgctaaattacgtggattataacatcatattccggcgtatgaattgatgagttgtacatcttgacattttcttctttcttctcttctccctttcccagaaacaaactttttttacccactataaaataaaatgagtatactacctattatatttctttctatatttttttattcttcattcgttcagacttttaacgcgtctgaatgtatcgacaaagggcaatattttgcatcattcatggagttagaaaacgagccagtaatcttaccatgtcctcaaataaatacgctatcatccggatataatatattagatattttatgggaaaaacgaggagcggataatgatagaattataccgatagataatggtagcaatatgctaattctgaacccgacacaatcagactctggtatttatatatgcattaccacgaacgaaacctactgtgacatgatgtcgttaaatttgacaatcgtgtctgtctcagaatcaaatatagatcttatctcgtatccacaaatagtaaatgagagatctactggcgaaatggtatgtcccaatattaatgcatttattgctagtaacgtaaacgcagatattatatggagcggacatcgacgccttagaaataagagacttaaacaacggacacctggaattattaccatagaagatgttagaaaaaatgatgctggttattatacatgtgttttagaatatatatacggtggcaaaacatataacgtaaccagaattgtaaaattagaggtacgggataaaataataccttctactatgcaattaccagatggcattgtaacttcaataggtagtaatttgactattgcgtgtagagtatcgttgaggcctcccacaacggacaccgacgtcttttggataagtaatggtatgtattacgaagaagatgatggggacggaaacggtagaataagtgtagcaaataaaatctatatgaccgataagagacgtgttattacatcccggttaaacattaatcctgttaaggaagaagatgctacaacgtttacgtgtatggcgtttactattcctagcatcagtaaaacagttactgttagtataacgtgaatgtatgttgttacatttccatgtcaattgagtttataagaatttttatacattatcttccaacaagcaattgacgaacgtattgctatgattaactcccacgatactatgcatattattaatcattaacttgcagactatacctagagctattttgacatactcgtgttcttgtgtaattgcagtatctatattattaaagtacgtaaatctagctatagttttattatttaattttagataatataccgtctccttatttttaaaaattgccacatcctttattaaatcatgaatgggaatttctatgtcatcgttagtatattgtgaacaacaagagcagatatctataggaaagggtggaatgcgatacattgatctatgtagttttaaaacacacgcgaactttgaagaatttatataaatcattccatcgatacatccttctatgttgacatgtatatatccaggaattcgtttattaatatcgggaaatgtataaactaaaacattgcccggaagcggtgcctctatctgcgttatatccgttcttaacttacaaaatgtaaccaatacctttgcatgacttgttttgttcggcaacgttagtttaaacttgacgaatggattaattacaatagcatgatccgcgcatctattaagtttttttactttaacgcccttgtatgtttttacagagactttatctaaatttctagtgcttgtatgtgttataaatataacgggatatagaactgaatcacctaccttagatacccaattacattttatcagatccagataataaacaaattttgtcgccctaactaattctatattgttatatattttacaattggttatgatatcatgtaataacttggagtctaacgcgcatcgtcgtacgtttatacaattgtgatttagtgtagtatatctacacatgtatttttccgcactatagtattctggactagtgataaaactatcgttatatctgtcttcgatgaactcatcgagatattgctctctgtcatattcatagacctgcataaactttctagacatcttacaatccgtgttattttaggatcatatttacatatttacgggtatatcaaagatgttagattagttaatgggaatcgtctataataatgaatattaaacaattatatgaggacttttaccacaaagcatcataaaaatgagtcgtcgtctgatttatgttttaaatatcaaccgcgaatcaactcataaaatacaagagaatgaaatatatacatattttagtcattgcaatatagaccatacttctacagaacttgattttgtagttaaaaactatgatctaaacagacgacaacctgtaactgggtatactgcactacactgctatttgtataataattactttacaaacgatgtactgaagatattattaaatcatggagtggatgtaacgatgaaaaccagtagcggacgtatgcctgtttatatattgcttactagatgttgtaatatttcacatgatgtagtgatagatatgatagacaaagataaaaaccacttatcgcatagagactattccaacctactactagagtatataaaatctcgttacatgttattgaaggaagaggatatcgatgagaacatagtatcaactttattagataagggaatcgatcctaactttaaacaagacggatatacagcgttacattattattatttgtgtctcgcacacgtttataaaccaggtgagtgtagaaaaccgataacgataaaaaaggccaagcgaattatttctttgtttatacaacatggagctaatctaaacgcgttagataattgtggtaatacaccattccatttgtatcttagtattgaaatgtgtaataatattcatatgactaaaatgctgttgacttttaatccgaatttcaaaatatgtaataatcatggattaacgcctatactatgttatataacttccgactacatacaacacgatattcttgttatgttaatacatcactatgaaacaaatgttggagaaatgccgatagatgagcgtcgtataatcgtattcgagtttatcaaaacatattctacacgtccggcagattcgataacttatttgatgaataggtttaaaaatataaatatttatacccgctatgaaggaaagacattattacacgtagcatgtgaatataataatacacaagtaatagattatcttatacgtatcaacggagatataaatgcgttaaccgacaataacaaacacgctatccaactcattatagataacaaagaaaattccccgtataccatcgattgtttattgtatatacttagatatattgtagataagaatgtgataagatcgttggtggatcaacttccatctctacctatcttcaatataaaatcatttgagaaattcatatcctactgtatacttttagatgacacattttacaataggcacgttaggaatcgcaattctaaaacgtatcgatacgcattttcaaaatacatgtcgtttgataaatacgatggtataataactaaatgtcataaagaaacaatattgctcaaactatccactgttctagacactacactatatgcagttttaagatgccataattcgaaaaagttaagaagatacctcaacgagttaaaaaaatataataacgataagtcctttaaaatatattctaatattatgaatgagagataccttaatgtatattataaagatatgtacgtgtcaaaggtatatgataaactatttcctgttttcacagataaaaattgtctactaacattactaccttcagaaattatatacgaaatattatacatgctgacaattaacgatctttataatatatcgtatccacctaccaaagtatagttgtatttttctcatgcgatgtgtgtaaaaaaactgatattatataaatattttagtgccgtataataaagatgacgatgaaaatgatggtacatatatatttcgtatcattatcattattgttattgctattccacagttacgccatagacatcgaaaatgaaatcacagaattcttcaataaaatgagagatactctaccagctaaagactctaaatggttgaatccagcatgtatgttcggaggcacaatgaatgatatggccactctaggagagccattcagcgcaaagtgtcctcctattgaagacagtcttttatcgcacagatataaagactatgtggttaaatgggaaaggctagaaaagaatagacggcgacaggtttctaataaacgtgttaaacatggtgatttatggatagccaactatacatctaaattcagtaaccgtaggtatttgtgtaccgtaactacaaagaatggtgactgtgttcagggtatagttagatctcatattagaaaacctccttcatgcattccaaaaacatatgaactaggtactcatgataagtatggcatagacttatactgtggaattctttacgcaaaacattataataatataacttggtataaagataataaggaaattaatatcgacgatattaagtattcacaaacgggaaagaaattaattattcataatccagagttagaagatagcggaagatacgactgttacgttcattacgacgacgttagaatcaagaatgatatcgtagtatcaagatgtaaaatacttacggttataccgtcacaagaccacaggtttaaactaaaaagaaattgcggatatgcgtcaaattaaaataaatggtacggacatgcttacagtgatgtacatgttaaataaacctacaaagaaacgatatgttaataatccgatatttacagattgggctaataagcaatataagttttataatcaaataatatataatgctaataagttaatagaacaaagtaagaaaatagacgacatgatagaggaggtatccattgacgataatcgtttatcaacactaccgttagaaattagacatttgattttctcgtacgcgttcctataaaaatagaaactataatcatataatagtgtaggttggtagtattgctcttgtgactagagactttagttaaggtactgtaaaaatagaaactataatcatataatagtgtaggttggtagtagggtactcgtgattaattttattgttaaacttgtccttaagtcttattaatatgtcttctaaagggggtagtggcggcatgtggagtgtctttatccatggacatgatggtagtaataaaggatctaaaacttatacatctggtggcggtggaatgtggggaggaggatcgtccagtggggttaacggaggtgtaaaatctggaactggtaaaatttaaacatagggataacagggtaat

SEQ ID NO: 62 - DNA, 17641 bp, Vaccinia virus
tagggataacagggtaatatgacgatgaaaatgatggtacatatatatttcgtatcattatcattattgttattgctattccacagttacgccatagacatcgaaaatgaaatcacagaattcttcaataaaatgagagatactctaccagctaaagactctaaatggttgaatccagcatgtatgttcggaggcacaatgaatgatatggccactctaggagagccattcagcgcaaagtgtcctcctattgaagacagtcttttatcgcacagatataaagactatgtggttaaatgggaaaggctagaaaagaatagacggcgacaggtttctaataaacgtgttaaacatggtgatttatggatagccaactatacatctaaattcagtaaccgtaggtatttgtgtaccgtaactacaaagaatggtgactgtgttcagggtatagttagatctcatattagaaaacctccttcatgcattccaaaaacatatgaactaggtactcatgataagtatggcatagacttatactgtggaattctttacgcaaaacattataataatataacttggtataaagataataaggaaattaatatcgacgatattaagtattcacaaacgggaaagaaattaattattcataatccagagttagaagatagcggaagatacgactgttacgttcattacgacgacgttagaatcaagaatgatatcgtagtatcaagatgtaaaatacttacggttataccgtcacaagaccacaggtttaaactaaaaagaaattgcggatatgcgtcaaattaaaataaatggtacggacatgcttacagtgatgtacatgttaaataaacctacaaagaaacgatatgttaataatccgatatttacagattgggctaataagcaatataagttttataatcaaataatatataatgctaataagttaatagaacaaagtaagaaaatagacgacatgatagaggaggtatccattgacgataatcgtttatcaacactaccgttagaaattagacatttgattttctcgtacgcgttcctataaaaatagaaactataatcatataatagtgtaggttggtagtattgctcttgtgactagagactttagttaaggtactgtaaaaatagaaactataatcatataatagtgtaggttggtagtagggtactcgtgattaattttattgttaaacttgtccttaagtcttattaatatgtcttctaaagggggtagtggcggcatgtggagtgtctttatccatggacatgatggtagtaataaaggatctaaaacttatacatctggtggcggtggaatgtggggaggaggatcgtccagtggggttaacggaggtgtaaaatctggaactggtaaaatttaaacactaaattatttttattaataattgtacaagtttttgacatgatatttaatgacattagttgtgtgggtgtatagagttcacagtagctcattcagtcaaaatgtttgactatttggaaaatgaggaggtggctctcgatgaacttaaacagatgttgagagacagagatcctaatgataccaggaaccaattcaagaataatgctttacacgcatacctttttaatgagcattgtaataatgtcgaggtcgtcaaactactactagacagtggcactaatccattacgcaaaaattggagacagctaccccattagaagaatacacaaatagtagacatgttaaagttaaaggatatagcgatggctctactagaagccactggatttagcaacataaatgactttaatatattcagctatatgaaatccaaaaatgtagacgttgacttgataaaggtgttggtagaacatggatttgacttgagtgttaaatgtgaaaaccatcgttcagttatagaaaattatgtaatgacaatgatcctgttcctaaaattattgatttgttcatagaaaatggctgcagtgttctttatgaggacgagtactgatacgcgtatgatgattatcaactacgaaattgcggtaccgtattgcatctgtattcaaagtcggatacgagagcatatgtgcgtccggaagttgttaaatgtctaattaatcacggaatcaagccgtcttttatagataaaaactattgtacaggtcttcaatattatattaagtcatctcatatagatatagacatcgttaaattgttaatgaaaggaatagataacactgcttattcatatatagacgatctaacatgttgcactcgaggaattatggctgattatctaaatagtgattatagatacaataaagatgtagatttggtcaaattgtttttggagaatggaaagcctcacggaataatgtgtagtattgtaccactatggagaaatgataaggaaaccatctttttgatattgaaaacaatgaactcggatgtcctccaacatatactaattgagtatatgacattcggcgatatccctctagtggaatatggaactgtggtaaataaagaggctatacacggatactttagaaatattaatattgattcttacacgatgaaatatctactaaaaaaggaagggagatgccatcaattatctcgatgatggagagatcccgattggacacctatgtaaatccaactatgaatgttataatttttacacttatacatacaaaaagggtctttgtgacatgtcttatgcttgcccaattcttagtactataaacatttgcctaccttatcttaaagacattaacatgattgacaaacgaggagaaacacttcttcacaaggctgttagatataataaacaatctctagtatctttactgctagaatccggttcagatgtcaacattagatcaaataacggatatacatgtatagccattgccatcaacgaatctaaaaacattgaactgctgaaaatgctattatgtcataaacctacattagattatgtgattgattcattgagagaaatatctaacatcgtagataactactatgctataaaacaatgtattaaatatgccatgattatagatgactgtacatcgtctaagattccagagtccataagtcaacgctataatgattatatagatctttgcaattaagaattgaatgagatgaaaaaaataatggtaggtggtaatactatgttctcattaatatttactgatcatggagctaaaattattcatagatatgccaataatccagaattacgtgagtattatgagttaaaacaaaataaaatatatgtggaagcatatgatattatttccaacgcaatagtgaaacatgatagaatacataaaaccatagaatcagttgatgataatacctacatttctaatcttccgtataccatcaaatacaaaatattcgagcaacaataagtattttttatacctttaaaattgataaataaattttttctagtgatattttggcaagatgagaatcctatttctcatcgccttcatgtatgggtgtgttcacccatatgttaatgccgacgaaatcaaatgtcctaacctaaacatcgtaacatcttctggagaatttcgttgcactggatgtgtgaaatttatgcctaattttagctacatgtattggttggcaaaggatatgagatcggacgaggataccaagtttatagaacatctgggtgatggcatcaaagaagatgaaaccgttcgtaccatagatggtagaatcgtcactctacagaaagtccttcatgtaaccgatactaataaatttgctcattataggttcacttgtgtcctcactacgatagatggcatttataaaaagaatgtttgctgaagtagttgtgtgctactatttttatttatgatataatctaaatgcaattgtcttgagaatccatccaatacggcagattatattagaaacaacgaattgaattgaatttaatctttcatacgagaaaaataacgacatacgtcgtcaacaaattaaactttttatttattagttaactagcttatagaacttgctcattgttatgtttctaaaacgggtacgacatataggacaattatccgacgcaccggtttctcttcgtgttttatgccatatattgatacatgttatgcaaaatatatgattacacgaatccaataaaccaaagtatctatcgttttgagtaaacaacttcatagcaaattccacattctttttctttacttactctatacacgtcctcgtatttatccagtattttgatgatatccaactcagaaatggttgttgtattattgggtgtataggtattattagctatgtaccaatttaccaaccttcttaatattgattgataatcacatcggttatccaattaataactaaattgtagtgtatatatagaccatatatgtttctatttttttgacagttacgtatagtttcagtaagttttgattgttgtattcctgtatctctagataagttagtcatatagtcccttccggcgatacgttttttccaagcccgaaattgattagccaaatgtggatttatttttgtgatattgatataatatttcggataatgcatactgttagtcttatatcatttggttcatctatgtattgtaatattgttacatgatctatagatgatgtattgattttggcaggatcgaattccatatccgcgactaaacagtgaaaaaaatgtaaatactttttaaattttaaattagtaaaacttttttttattttttatgattccaaaaatactgaatacaaagtcctaaattataaatatggagatcatactaccacaacttattattatgtatacaaggccggtgtaatagatagatatatataattctattacaccggcagacaattaccgatcggtatttgtcgttaccaacataccgtataatatgtaatatacaattccataacccattgacagttgttatacatcaaaattgcaattcttttgattacgatgttataagaatgtagttaattgatgtatgatgttaatgtgtcctctttcctcttataacatcgtaatcaaaaacttttttataatatatacctaataatgtgtcttaatagttctcgtgattcgtcaaacaatcattcttataaaatataataaatcaacgtaaaaacacataaaaataagcgtaactaataagacaatggatatttacgacgataaaggtctacagactattaaactgtttaataatgaatttgattgtataaggaatgacatcagagaattatttaaacatgtaactgattccgatagtatacaacttccgatggaagacaattctgatattatagaaaatatcagaaaaatactatatagacgattaaaaaatgtagaatgtgttgacatcgataacacaataacttttatgaaatacgatccaaatgatgataataagcgtacgtgttctaattgggtacccttaactaataactatatggaatattgtctagtaatatatttggaaacaccgatatgtggaggcaaaataaaattataccaccctacaggaaatataaagtcggataaggatattatgtttgcaaagactctagactttaaatcaaagaaagtgttaactggacgtaagacaattgccgttctagacatatccgtttcatataatagatcaataactactattcactacaacgacgacgttgatatagatatacatactgataaaaatggaaaagagttatgttattgttatataacaatagatgatcattacttggttgatgtggaaactataggagttatagtcaatagatctggaaaatgtctgttagtaaataaccatctaggtataggtatcgttaaagataaacgtataagcgatagttttggagatgtatgtatggatacaatatttgacttttctgaagcacgagagttattttcattaactaatgatgataacagaaatatagcatgggacactgataaactagacgatgatacagatatatggactcccgtcacagaagatgattacaaatttctttctagactagtattgtatgcaaaatctcaatcggatactgtattcgactattatgttcttactggtgatacggaaccacccactgtattcattttcaaggtaactagattttactttaatatgctgaaataaaaaatttttgtataatatctagaggtagaggtattgtttagataaatacaaataacatagatacatcgcatatttagcatttttataaatatacataagacatacactttatacatttttgtaaaaatactcataaaaaaaatttataaaaattatggcacaaccatatcttgtagaggtagtttagttcgtcgagtgaacctataaacagataatagacaacacataataataatgcctactaatacaagcataataccgggagatgggatatatgacgttgtagtgtttggtttttctgaacgttgatagtctactaatactacatgctgacatctaatgcctgtataaccatgagagcatctacaatacataccgtcgatatctctagcgtggatacagtcaccgtgtaaacaatatccatctccctctggaccgcataatctgatagctggaatatctgttgtagcgtttgtaatttctggcaatgtcgtttcgatagcgttaccactatcggcgaatgatctgattatcatagcagcgaacaacaacatcagatatttcatcgacatttttgatggattctgtgtttatgctgtttctcagtgtgtgtttatgacaagattgggaattttatattattaattcagtaatataaactaataatatattgttaattgtgtaaataatataaaaataacaatacaatattgaatgtgttgctgttaaaaatgtatgtgttaatataatagaataaaataaatgagtatgatcattttagataacgattgattttatcattacccttcattcttatattctttgcttacggaacctatatttagaaacatctactaacgattttttatgcttgcattattaatggtatgtaataccaatttgttaagtatgaatacggggtacaaacataaactgaaatttaacattatttatttatgatatatatcgttatcgttattgtttggtctataccatggatatctttaaagaactaatcgtaaaacaccctgatgaaaatgttttgatttctccagtttccattttatctactttatctattctaaatcatggagcagctggttctacagctgaacaactatcaaaatatatagagaatatgaatgagaatacacccgatgataagaaggatgacaataatgacatggacgtagatattccgtattgtgcgacactagctaccgcaaataaaatatacggtagcgatagtatcgagttccatgcctccttcctacaaaaaataaaagacgattttcaaactgtaaactttaataatgctaaccaaacaaaggaactaatcaacgaatgggttaagacaatgacaaatggtaaaattaattccttattgactagtccgctatccattaatactcgtatgacagttgttagcgccgtccattttaaagcaatgtggaaatatccattttctaaacatcttacatatacagacaagttttatatttctaagaatatagttaccagcgttgatatgatggtgggtaccgagaataacttgcaatatgtacatattaatgaattattcggaggattctctattatcgatattccatacgagggaaactctagtatggtgattatactaccggacgacatagaaggtatatataacatagaaaaaaatataacagatgaaaaatttaaaaaatggtgtggtatgttatctactaaaagtatagacttgtatatgccaaagtttaaagtggaaatgacagaaccgtataatctggtacctattctagaaaatttaggacttactaatatattcggatattatgcagattttagcaagatgtgtaatgaaactatcactgtagaaaaatttctacatacgacgtttatagatgttaatgaggagtatacagaagcatcggccgttacaggagtatttatgactaacttttcgatggtatatcgtacgaaggtctacataaaccatccattcatgtacatgattaaagacaacacaggacgtatactttttatagggaaatactgctatccgcaataaatataaacaaatagacttttatcacgtttatctatgtctaaatattacaaatagtataaactaaagctgataatacttaaaaaaataataatatcatttacaattaatagtataaactaaaaattaaacaaatcgttattataagtaatatcaaaatgatgatatacggattaatagcgtgtcttatattcgtgacttcatccatcgctagtccactttatattcccgttattccacccattacggaagataaatcgttcaatagtgtagaggtattagtttccttgtttagagatgaccaaaaagactatacggtaacttctcagttcaataactacactatcgataccaaagactggactatcggcgtactatccacacctgatggtttggatataccattgactaatataacttattggtcacggtttactataggtcgtgcattgttcaaatcagagtctgaggatattttccaaaagaaaatgagtattctaggtgtttctatagaatgtaagaagtcgtcgacattacttacttttttgaccgtgcgtaaaatgactcgagtatttaataaatttccagatatggcttattatcgaggagactgtttaaaagccgtttatgtaacaatgacttataaaaatactaaaactggagagactgattacacgtacctctctaatggggggttgcctgcatactatcgtaatggggtcgatggttgattattgattagtatattccttattcacacaaaaagaacatttttataaacatgaaaccactgtctaaatgtaattatgatcttgatttatagatgaagatcagcctttagaggattttaaccagtatgtttaatatgaaaaaaataaacataacatattttgagattaagcgctattgtgcttaattattttgctctataaactgaatatatagccacaattattgacgggcttgtttatgaccggcaatcatgaatttacagaaattatctctggctatatatcttactgcgacatgttcgtggtgttatgaaacatgcataagaaaaactgcgttgtatcatgacattcaattggagcatgtagaagacaataaagatagtgtagcgtcgctaccgtacaagtagtcaatcaaagagaacgtagtagattgttggctacatttaattggacagatatagctgagggtgttagaaatgagttcattaaaatatgtgatatcaacggaacatatttatataattatactattgctgttagtataattattgattccacggaagaactaccaacagttactccaattacaacaacatatgaaccttctacatataattatactatcgatgatagcactgttattactactgaagaactacaagtgactcctcatatggatctccatcgatgatacatgtattaaaatactttccgaataagtcttttaaatattgtattaattatgaaaaactatgctatgcgagtatgatgcaaagatgtttaatgatacgatactagattttatctctagcgagagatgtcgttagaatcatttatcataactacgtttaataataattcatcaacgaatatcgataacatgtgtcatttatacgttaaagtctgtccgtcttctctattgtttagactgtttgtagaatgctgtgatataaacaaactagtagaaggtacgactccgttacactgttatctaatgaatgaaggatttgaatcatctgttttaaaaaacctattaaaggagtatgtcatgacagtgatggtcacattccattacacaaatatttaactcatgatgaagttgagaatgatatgctttctgatagtatagatagctttagctaatataaaaatatattaatccactatatattctagacttgatttaaaaccgataaactactacgtactgtataagttgttaagaaaaggagcagaccctaattatgcagatgatagaggtaatacttttcttcattacttctgcatctatatgtccacttatgagaaaacgtcatttaataagatgcatcgtgaaaagaaatttattaaagagttggtaaaatatgaaaccgaaagtaaataatataggaaatacacctctacataactacgtatctcaatatgatatcactctcattcctcatccacaacccattaaaaaaatggaaattaaagccctctattagcataaacggctacaggtctacctttacaatggcctttccttgtgcccagttcagaccctgtcattgccacgctactaaggactccctgaataccgtggccgacgtcagacattgtctgactgaatacatcctgtgggtttctcatagatggacccatagagaaactgcagggcctctctacaggcttctcatctctttcagaactgatgcaacggagctctttggtggtgagttgaaggattcacttccgtgggacaatatcgacaattgcgtggagatcattaaatgtttcatcagaaatgactccatgaaaaccgccgaagaacttcgtgcaatcattggactttgtactcaatcagctatcgtctctggaagagtcttcaacgataagtatatcgacatactacttatgctgcgaaagattctgaacgagaacgactatctcaccctcttggatcatatccgcactgctaaatactaaatctccttcatgctctctcactacactttttatcatcttatgaggaatgattgccttcatcatttttcgtgaaataggaataattagcaccagaatagctatggattgcacatgtattctatgtcgtctactggatgaagatgtgacgtacaaaaaaataaaactagaaattgaaacgtgtcacaacttatcaaaacatatagatagacgaggaaacaatgcgctacattgttacgtcttcaataaatgcgatacagacattaagattgttcgactgttactctctcgcggagtcgagagactttgtagaaacaacgaaggattaactccgctaggagtatacagtaagcatagatacgtcaaatctcaaattgtgcatctactgatatccagctattcgaattcctctaacgaactcaagtcgaatataaatgatttcgatctgtattcggataatatcgacttacgtctgctaaaatacctaattgtggataaacggatacgtccgtccaagaatacgaattatgcaatcaatggtctcggattggtggatatatacgtaacgacgcctaatccgagaccagaagtattgctatggcttcttaaatcagaatgttacagcaccggttacgtatttcgtacctgtatgtacaacagtgatatgtgtaagaactctcttcattactatatatcgtctcatagagaatctcaatctctatccaaggatgtaattaaatgtttgatcaataacaatgtttccatccatggcagagacgaaggaggatctttacccatccaatactactggtctttctcaaccatagatatagagattgttaaattattattaataaaggatgtggacacgtgtagagtatacgacgtcagccctatattagaggcgtattatctaaacaagcgatttagagtaaccccatataatgtagacatggaaatcgttaatcttcttattgagagacgtcatactcttgtcgacgtaatgcgtagtattacttcgtacgattccagagaatataaccactacatcatcgataacattctaaagagatttagacaacaggatgaatccatcgtacaagccatgttgataaactacttacattacggcgatatggtcgttcgatgcatgttagataacggacaacaactatcctctgcacgactactttgttaataataatctcgtcgatgtaaacgtcgtaaggtttatcgtggaaaatatggacacgcggctgtaaatcacatatctaacaatggccgtctatgtatgtacggtctgatattatcgagatttaataattgcgggtatcactgttatgaaaccatactaatagatgtatttgatatactaagcaagtacatggataatatagatatgatcgataatgagaataaaactctactatattacgcggtcgatgtcaataatatacaatttgcaaagcggttattggaatatggagcgagtgttacaacatcacgctcgataatcaatacggccatccagaaaagtagttacagaagagaaaacaaaacgaagctagttgatttattacttagctaccatcccactctagagactatgattgacgcatttaatagagatatacgctatctatatcctgaaccattattcgcctgtatcagatacgccttaatcatagatgatgattttccttctaaagtaaagtatgatatcgccggtcgtcataaggaactaaagcgctatagagtagacattaatagaatgaagaatgcctacatatcaggcgtctccatgtttgatatattatttaaacgaagcaaacgccacagattgagatacgcaaagaatccgacatcaaatggtacaaaaaagaactaacgtccatcattacagaaactgtaaagaacaatgagaggatcgactccatagtggacaacattaatacagacgataacttgatttcgaaattacccatggagatactttattactccattaaataatttatcatggagcgataatgtcctgtttcatttgtttccatgacatattacaaaatcgattccgtccaagatgataaaaacatttaccggcatcataaacacggagtttattttatatgtctcgcataaacattactaaaaaaatatattgttcggttttctttcacatctttaattatgaaaaagtaaatcattatgagatggacgagattgtacgcatcgttcgcgacagtatgtggtacatacctaacgtatttatggacgacggtaagaatgaaggtcacgtttctgtcaacaatgtttgtcatatgtattttacgttctttgatgtggatacatcgtctcatctgtttaagctagttattaaacactgcgatctgaataaacgaggtaactctccattacattgctatacgatgaatacacgatttaatccatctgtattaaagatattgttacaccacggcatgcgtaactttgatagcaaggatgaccactatcaatcgataacaagatctttgatatactaacggacaccattgatgactttagtaaatcatccgatctattgctgtgttatcttagatataaattcaatgggagcttaaactattacgttctgtacaaaggatccgaccctaattgcgccgacgaggatgaactcacttctcttcattactactgtaaacacatatccacgttctacaaaagcaattattacaagtcaagtcacactaagatgcgagccgagaagcgattcatctacgcgataatagattatggagcaaacattaacgccgttacacacttaccttcaacagtataccaaacatagtcctcgtgtggtgtatgctcttttatctcgaggatacgtaataatcttgattgtacacccatcatggaacgattgtgcaacaggtcatattctcataatgttactcaattggcacgaacaaaaggaagaaggacaacatctactttatctattcataaaacataatcaaggatacactctcaatatactacggtatctactagataggttcgacattcagaaagacgaatattataataccgcctttcaaaattgtaacaacaatgttgcctcatacatcggatacgacatcaaccttccgactaaagacggtattcgacttggtgtttgaaaacagaaacatcatatacaaggcggatgttgtgaatgacatcatccaccacagactgaaagtacctatgattaaatcgttgttctacaagatgtcagaattctctccctacgacgattactacgtaaaaaagatactagcctactgcctattaagggacgagtcattcgcggaactacatagtaaattctgtttaaacgaggactataaaagtgtatttatgaaaaatatatcattcgataagatagattccatcatcgtgacataagtcgccttaaagagattcgaatctccgacaccgacctgtatacggtatcacagctatcttaaagccatacattcagacagtcacatttcatttcccatgtacgacgatctcatagaacagtgccatctatcgatggagcgtaaaagtaaactcgtcgacaaagcactcaataaattagagtctaccatcgatggccaatctagactatcgtatttgcctccggaaattatgcgcaatatcatctaaacagtatgttgtacggaaagaaccattacaaatattatccatgatagaaagaaaatatctatatgattggagaagtaggaaacaggaacaagacaacgattactacattattaaattatgaagtccgtattatactcgtatatattgtttctctcatgtataataataaacggaagagatatagcaccgcatgcaccatccgatggaaagtgtaaagacaacgaatacaaacgccataatttgtgtccgggaacatacgcttccagattatgcgatagcaagactaacacacaatgtacgccgtgtggttcgggtaccttcacatctcgcaataatcatttacccgcttgtctaagttgtaacggaagatgcgatcgtgtaacactactcacaatagaatctgtgaatgctctcccggatattattgtcttctcaaaggatcatccggatgcaaggcatgtgtttcccaaacaaaatgtggaataggatacggagtatccggagacgtcatctgttctccgtgtggtctcggaacatattctcacaccgtctcttccgcagataaatgcgaacccgtacccagaaatacgtttaactatatcgatgtggaaattaacctgtatccagttaacgacacatcgtgtactcggacgaccactaccggtctcagcgaatccatctcaacgtcggaactaactattactatgaatcataaagactgcgatcccgtctttcgtgatggatacttctctgtccttaataaggtagcaacttcaggtttctttacaggagaaaggtgtgcactctgaatttcgagattaaatgcaataacaaagattcttcctccaaacagttaacgaaagcaaagaatgatactatcatgccgcattcggagactgtctatctagcgtcgacatctatatactatatagtaataccaatactcaagactacgaaactgatacaatctcttatcatgtgggtaatgttctcgatgtcgatagccatatgcccggtagttgcgatatacataaactgatcactaattccaaacccacccgctttttatagtaagtttttcacccataaatacaataattaatttctcgtaaaagtagaaaatatattctaatttattgcacggtaaggaagtagaatcataaagaacagtaatcaatcaatagcaatcatgaaacaatatatcgtcctggcatgcatgtgcctgccagtcttcagcaatcctcctcctcgtgtacggaagaagaaaacaaacatcatatgggaatcgatgttattatcaaagtcacaaagcaagaccaaacaccgaccaatgataagatttgccaatccgtaacggaaattacagagtccgagtcagatccagatcccgaggtggaatcagaagatgattccacatcagtcgaggatgtagatcctcctaccacttattactccatcatcggtggaggtctgagaatgaactttggattcaccaaatgtcctcagattaaatccatctcagaatccgctgatggaaacacagtgaatgctagattgtccagcgtgtccccaggacaaggtaaggactctcccgcgatcactcatgaagaagctcttgctatgatcaaagactgtgaggtgtctatcgacatcagatgtagcgaagaagagaaagacagcgacatcaagacccatccagtactcgggtctaacatctctcataagaaagtgagttacgaagatatcatcggttcaacgatcgtcgatacaaaatgcgtcaagaatctagagtttagcgttcgtatcggagacatgtgcaaggaatcatctgaacttgaggtcaaggatggattcaagtatgtcgacggatcggcatctgaaggtgcaaccgatgatacttcactcatcgattcaacaaaactcaaagcgtgtgtctgaatcgataactctattcatctgaaattggatgagtagggttaatcgaacgattcaggcacaccacgaattaaaaaagtgtaccggacactatattccggtttgcaaaacaaaaatgttcttaactacattcacaaaaagttacctctcgcgacttcttctttttctgtctcaatagtgtgatacgattatgacactattcctattcctattcctatttcctttcagggtatcacaaaaatattaaacctctttctgatggtctcataaaaaaagttttacaaaaatatttttattctctttctctctttgatggtctcataaaaaaagttttacaaaaatatttttattctctttctctctttgatggtctcataaaaaaagttttacaaaaatatttttattctctttctctctttgatggtctcataaaaaaagttttacaaaaatatttttattctctttctctctttgatggtctcataaaaaaagttttacaaaaatatttttattctctttctctctttgatggtctcataaaaaaagttttacaaaaatatttttattctctttctctctttgatggtctcataaaaaaagttttacaaaaatatttttattctctttctctctttgatggtctcataaaaaaagttttacaaaaatatttttattctctttctctctttgatggtctcataaaaaatattaaacctctttctgatggtgtcactaaaatatttttattctcattctcattttctctttctctcttcaatggagtcataaaatatttttattctctttctctcttcgatggtctcacaaaaatattaaacctctttctgatggtgtcactaaaatatttttattctcattctcattttctctttctctcttcaatggagtcataaaatatttttattctctttctctcttcgatggtctcacaaaaatattaaacctcttgctagcttctggcgaagagcttcttctagggataacagggtaat

SEQ ID NO: 63 - DNA, 2540 bp, Vaccinia virus
tagggataacagggtaatgaagaagctcttcgccatcagaaagaggtttaatatttttgtgagaccatcgaagagagaaagagataaaacttttttacgactccatcagaaagaggtttaatatttttgtgagaccatcgaagagagaaagagataaaacttttttacgactccatcagaaagaggtttaatatttttgtgagaccatcgaaggagaaagagataaaacttttttacgactccatcagaaagaggtttaatatttttgtgagaccatcgaaggagaaagagataaaacttttttacgactccatcagaaagaggtttaatatttttgtgagaccatcgaagagagaaagagataaaacttttttacgactccatcagaaagaggtttaatatttttgtgagaccatcgaagagagaaagagataaaacttttttacgactccatcagaaagaggtttaatatttttgtgagaccatcgaaggagaaagagataaaacttttttacgactccatcagaaagaggtttaatatttttgtgagaccatcgaagagagaaagagataaaacttttttacgactccatcagaaagaggtttaatatttttgtgagaccatcgaagagagaaagagataaaacttttttacgactccatcagaaagaggtttaatatttttgtgagaccatcgaagagagaaagagataaaacttttttacgactccatcagaaagaggtttaatatttttgtgagaccatcgaagagagaaagagataaaacttttttacgactccatcagaaagaggtttaatatttttgtgagaccatcgaagagagaaagagataaaacttttttacgactccatcagaaagaggtttaatatttttgtgagaccatcgaagagagaaagagaaagagatagttgatctagatatttttcttagtacaaaagtcaatgttttaaaatatatggacaagaatttgtctgtataaaaacttgtgtgaaattttgtaccaaagaaaaaatgtgagcagtatcccctacatggattttactagatcatttatataccaaaaaatattatacgatctacgttttattatatgattttaacgtgtaaattataaacattattttatgatatacaattgtctggtaacctagatgggcataggggatgttgataagctcgacgagtatatgttgttggacgttattgtttaagaaatagttgatgcatcagaaagagaataaaaaatattttagtgagaccatcgaagagagaaagagataaaacttttttacgactccatcagaaagaggtttaatatttttgtgagaccatcgaagagagaaagagataaaacttttttacgactccatcagaaagaggtttaatatttttgtgagaccatcgaagagagaaagagataaaacttttttacgactccatcagaaagaggtttaatatttttgtgagaccatcgaagagagaaagagataaaacttttttacgactccatcagaaagaggtttaatatttttgtgagaccatcgaagagagaaagagataaaacttttttacgactccatcagaaagaggtttaatatttttgtgagaccatcgaagagagaaagagataaaacttttttacgactccatcagaaagaggtttaatatttttgtgagaccatcgaagagagaaagagataaaacttttttacgactccatcagaaagaggtttaatatttttgtgagaccatcgaagagagaaagagataaaacttttttacgactccatcagaaagaggtttaatatttttgtgagaccatcgaagagagaaagagataaaacttttttacgactccatcagaaagaggtttaatatttttgtgagaccatcgaagagagaaagagataaaacttttttacgactccatcagaaagaggtttaatatttttgtgagaccatcgaagagagaaagagataaaacttttttacgactccatcagaaagaggtttaatatttttgtgagaccatcgaagagagaaagagataaaacttttttacgactccatcagaaagaggtttaatatttttgtgagaccatcgaagagagaaagagataaaacttttttacgactccatcagaaagaggtttaatatttttgtgagaccatcgaagagagaaagagataaaacttttttacgactccatcagaaagaggtttaatatttttgtgagaccatcgaagagagaaagagataaaacttttttacgactccatcagaaagaggtttaatatttttgtgagaccatcgaagagagaaagagataaaacttttttacgactccatcagaaagaggtttaatatttttgtgagaccatcgaagagagaaagagataaaacttttttacgactccatcagaaagaggtttaatatttttgtgagaccatcgaagagagaaagagataaaacttttttacgactccgctagcgaagaatagggataacagggtaat

SEQ ID NO: 64 - DNA, 61 bp, Vaccinia virus
tgtgtgacccatgactgtaggaaactctagagtgtaagaaagatcgatcgctttatagaga

SEQ ID NO: 65 - DNA, 61 bp, Vaccinia virus
tggtctctataaagcgatcgatctttcttacactctagagtttcctacagtcatgggtcac

SEQ ID NO: 66 - DNA, 157 bp, Vaccinia virus
acatttttttctagacactaaataaaatatttaaaatataatattaatgtactaaaacttatatattattaatttatctaactaaagttagtaaattatatatataattttataattaatttaattttactaattttatttagtgtctagaaaaaaa

SEQ ID NO: 67 - DNA, 157 bp, Vaccinia virus; identical to SEQ ID NO: 12

SEQ ID NO: 68 - DNA, 33 bp, Artificial Sequence
  Description of Artificial Sequence: Synthetic oligonucleotide
attatccgggtctcttaaaggatggtgagatta

SEQ ID NO: 69 - DNA, 33 bp, Artificial Sequence
  Description of Artificial Sequence: Synthetic oligonucleotide
attatccgggcctcttaaaggatggtgagatta

SEQ ID NO: 70 - DNA, 33 bp, Artificial Sequence
  Description of Artificial Sequence: Synthetic oligonucleotide
attatccgagcctcttaaaggatggtgagatta

SEQ ID NO: 71 - DNA, 33 bp, Artificial Sequence
  Description of Artificial Sequence: Synthetic oligonucleotide
attwtcctggccycttaaakgrtkgtgagatta

SEQ ID NO: 72 - DNA, 30 bp, Artificial Sequence
  Description of Artificial Sequence: Synthetic oligonucleotide
atccaggcctcttaatggaaggtgagatta

SEQ ID NO: 73 - DNA, 24 bp, Artificial Sequence
  Description of Artificial Sequence: Synthetic oligonucleotide
attatccggrcctctyaaaggaca

SEQ ID NO: 74 - DNA, 33 bp, Artificial Sequence
  Description of Artificial Sequence: Synthetic oligonucleotide
atgatccgggcctcttaaaggatggtgagatta

SEQ ID NO: 75 - DNA, 33 bp, Artificial Sequence
  Description of Artificial Sequence: Synthetic oligonucleotide
attatccgggcctcttaaaggatggtgacatta

SEQ ID NO: 76 - DNA, 33 bp, Artificial Sequence
  Description of Artificial Sequence: Synthetic oligonucleotide
attatccgggcctattaaaggatggtgagatta

SEQ ID NO: 77 - DNA, 33 bp, Artificial Sequence
  Description of Artificial Sequence: Synthetic oligonucleotide
attaaccgggcctcttaaaggatggtgagatta

SEQ ID NO: 78 - DNA, 29 bp, Artificial Sequence
  Description of Artificial Sequence: Synthetic oligonucleotide
tccgggactattaaaggatggggagatta

SEQ ID NO: 79 - DNA, 33 bp, Artificial Sequence
  Description of Artificial Sequence: Synthetic oligonucleotide
attgtccgggcctgttaaaggatggtgagatta

SEQ ID NO: 80 - DNA, 33 bp, Artificial Sequence
  Description of Artificial Sequence: Synthetic oligonucleotide
attctccgggcctcttaaaggatggtgagatta

SEQ ID NO: 81 - DNA, 33 bp, Artificial Sequence
  Description of Artificial Sequence: Synthetic oligonucleotide
aytatccggsmctcytaaaggatctgactctta

SEQ ID NO: 82 - DNA, 31 bp, Artificial Sequence
  Description of Artificial Sequence: Synthetic oligonucleotide
attatccgggcctcttaaaggatggtgagat

SEQ ID NO: 83 - DNA, 21 bp, Artificial Sequence
  Description of Artificial Sequence: Synthetic oligonucleotide
attatccgggcctcttaaagg

SEQ ID NO: 84 - DNA, 22 bp, Artificial Sequence
  Description of Artificial Sequence: Synthetic oligonucleotide
attatccgggcctcttaaagga

SEQ ID NO: 85 - DNA, 33 bp, Artificial Sequence
  Description of Artificial Sequence: Synthetic oligonucleotide
attatcctggcctcttaaaggatggtgagatta

SEQ ID NO: 86 - DNA, 27 bp, Artificial Sequence
  Description of Artificial Sequence: Synthetic oligonucleotide
attatccggtcctcttaagtgagatta

SEQ ID NO: 87 - DNA, 29 bp, Artificial Sequence
  Description of Artificial Sequence: Synthetic oligonucleotide
attagccggggctcttaaaggatggtgag

SEQ ID NO: 88 - DNA, 33 bp, Artificial Sequence
  Description of Artificial Sequence: Synthetic oligonucleotide
attatccgggcctcgtgaaggttggtgcgacta

SEQ ID NO: 89 - DNA, 28 bp, Artificial Sequence
  Description of Artificial Sequence: Synthetic oligonucleotide
attatgcggtcctcttaagggggggtta

SEQ ID NO: 90 - DNA, 33 bp, Artificial Sequence
  Description of Artificial Sequence: Synthetic oligonucleotide
actaccagggcctcttaaaggatggtgagatta

SEQ ID NO: 91 - DNA, 32 bp, Artificial Sequence
  Description of Artificial Sequence: Synthetic oligonucleotide
gggtgacattcaaagatctgagaccaaattcg

SEQ ID NO: 92 - DNA, 32 bp, Artificial Sequence
  Description of Artificial Sequence: Synthetic oligonucleotide
gggtgacattcaaagatctgaggccaaattcg

SEQ ID NO: 93 - DNA, 32 bp, Artificial Sequence
  Description of Artificial Sequence: Synthetic oligonucleotide
tggtgcacttcatcgatctgaggccaaattct

SEQ ID NO: 94 - DNA, 32 bp, Artificial Sequence
  Description of Artificial Sequence: Synthetic oligonucleotide
gggtgacattaaaagatctgaggccaaattcg

SEQ ID NO: 95 - DNA, 32 bp, Artificial Sequence
  Description of Artificial Sequence: Synthetic oligonucleotide
ggttgacattcaaagatctgaggccaaattcg

SEQ ID NO: 96 - DNA, 32 bp, Artificial Sequence
  Description of Artificial Sequence: Synthetic oligonucleotide
gggtgacattgaaagatctgtggccaaattag

SEQ ID NO: 97 - DNA, 24 bp, Artificial Sequence
  Description of Artificial Sequence: Synthetic oligonucleotide
gggaaagawctgaggcmarattcg

SEQ ID NO: 98 - DNA, 32 bp, Artificial Sequence
  Description of Artificial Sequence: Synthetic oligonucleotide
grgtkrcmttcaaagatctgaggccaaattcg

SEQ ID NO: 99 - DNA, 32 bp, Artificial Sequence
  Description of Artificial Sequence: Synthetic oligonucleotide
gggtgacattcagaggtctgaggccaaattcg

SEQ ID NO: 100 - DNA, 23 bp, Artificial Sequence
  Description of Artificial Sequence: Synthetic oligonucleotide
gggtgtcattctaagatctgacg

SEQ ID NO: 101 - DNA, 31 bp, Artificial Sequence
  Description of Artificial Sequence: Synthetic oligonucleotide
ggtgacattacaatatatgaggccaaattcg

SEQ ID NO: 102 - DNA, 32 bp, Artificial Sequence
  Description of Artificial Sequence: Synthetic oligonucleotide
gggtgacattccaagatctgagtccaacttcg

SEQ ID NO: 103 - DNA, 32 bp, Artificial Sequence
  Description of Artificial Sequence: Synthetic oligonucleotide
gggtgacattcaaagatctgaggacaaattcg

SEQ ID NO: 104 - DNA, 32 bp, Artificial Sequence
  Description of Artificial Sequence: Synthetic oligonucleotide
gggtgactatcatcgatatcaggcaaaattcg

SEQ ID NO: 105 - DNA, 32 bp, Artificial Sequence
  Description of Artificial Sequence: Synthetic oligonucleotide
gggtgacattcaaagatytgagrccaaattcg

SEQ ID NO: 106 - DNA, 32 bp, Artificial Sequence
  Description of Artificial Sequence: Synthetic oligonucleotide
gggtgacattcaatgatctgaggcgaaattcg

SEQ ID NO: 107 - DNA, 32 bp, Artificial Sequence
  Description of Artificial Sequence: Synthetic oligonucleotide
gggtgacattcaaagatctggggcccaattcg

SEQ ID NO: 108 - DNA, 32 bp, Artificial Sequence
  Description of Artificial Sequence: Synthetic oligonucleotide
gggtgacattcgcagatcagaggccaaattcg

SEQ ID NO: 109 - DNA, 32 bp, Artificial Sequence
  Description of Artificial Sequence: Synthetic oligonucleotide
gggtgrcattcaaagatctgaggccaaattcg

SEQ ID NO: 110 - DNA, 32 bp, Artificial Sequence
  Description of Artificial Sequence: Synthetic oligonucleotide
gggtgacatgcaaagatctgaggccaaattcg

SEQ ID NO: 111 - DNA, 32 bp, Artificial Sequence
  Description of Artificial Sequence: Synthetic oligonucleotide
gggtgacatccaaagatcggatgccaaatacg

SEQ ID NO: 112 - DNA, 32 bp, Artificial Sequence
  Description of Artificial Sequence: Synthetic oligonucleotide
gggtgacattcaaagatctgaggcaaaattcg

SEQ ID NO: 113 - DNA, 27 bp, Artificial Sequence
  Description of Artificial Sequence: Synthetic oligonucleotide
gggtgacattcaaagaggccaaattcg

SEQ ID NO: 114 - DNA, 32 bp, Artificial Sequence
  Description of Artificial Sequence: Synthetic oligonucleotide
gggttacattcaaagatctgaggccaaattcg

SEQ ID NO: 115 - DNA, 32 bp, Artificial Sequence
  Description of Artificial Sequence: Synthetic oligonucleotide
ggggtacgatcaaagatctggggctaaattcg

SEQ ID NO: 116 - DNA, 25 bp, Artificial Sequence
  Description of Artificial Sequence: Synthetic oligonucleotide
attcaaagrtctgaggccaaattcg

SEQ ID NO: 117 - DNA, 154 bp, Vaccinia virus
acatttttttctagacactaaataaatagtaaaattaaattaattataaaattatgtatataatttactaactttagttagataaattaataatacataaattttagtatattaatattatattttaaatatttatttagtgtctagaaaaaaa

SEQ ID NO: 118 - DNA, 154 bp, Vaccinia virus
acatttttttctagacactaaataaatatttaaaatataatattaatatactaaaatttatgtattattaatttatctaactaaagttagtaaattatatacataattttataattaatttaattttactatttatttagtgtctagaaaaaaa

SEQ ID NO: 119 - DNA, 61 bp, Vaccinia virus
tgtgtgaccaacgaccgtaggaaactctagagggtaagaaaaatcaatcgctttatagaga

SEQ ID NO: 120 - DNA, 61 bp, Vaccinia virus
tggtctctataaagcgattgatttttcttaccctctagagtttcctacggtcgttggtcac
